United States Patent Application Publication US 2026/0364192 A1, published November 19, 2026 (application 18/881,000).

The application's sequence listing, which the Patent Office published only in electronic form, follows.

SEQUENCE LISTING (1074 sequences)

SEQ ID NO: 1 - protein, 9 aa, synthetic construct
GYSITSGYY

SEQ ID NO: 2 - protein, 7 aa, synthetic construct
ITFDGAN

SEQ ID NO: 3 - protein, 12 aa, synthetic construct
TRSSYDYDVLDY

SEQ ID NO: 4 - protein, 6 aa, synthetic construct
QDISNF

SEQ ID NO: 5 - skipped

SEQ ID NO: 6 - protein, 9 aa, synthetic construct
QQGHTLPYT

SEQ ID NO: 7 - protein, 6 aa, synthetic construct
SGYYWN

SEQ ID NO: 8 - protein, 16 aa, synthetic construct
YITFDGANNYNPSLKN

SEQ ID NO: 9 - protein, 10 aa, synthetic construct
SSYDYDVLDY

SEQ ID NO: 10 - protein, 11 aa, synthetic construct
RASQDISNFLN

SEQ ID NO: 11 - protein, 7 aa, synthetic construct
YTSRLHS

SEQ ID NO: 12 - protein, 8 aa, synthetic construct
GYSITSGY

SEQ ID NO: 13 - skipped

SEQ ID NO: 14 - protein, 8 aa, synthetic construct
SYDYDVLD

SEQ ID NO: 15 - protein, 7 aa, synthetic construct
SQDISNF

SEQ ID NO: 16 - protein, 6 aa, synthetic construct
GHTLPY

SEQ ID NO: 17 - protein, 119 aa, synthetic construct
QVQLQESGPGLVKPSQTLSLTCTVTGYSITSGYYWNWIRQPPGKGLEWIGYITFDGANNYNPSLKNRVSISRDTSKNQFSLKLSSVTAEDTATYYCTRSSYDYDVLDYWGQGTTVTVSS

SEQ ID NO: 18 - protein, 107 aa, synthetic construct
DIQMTQSPSSLSASVGDRVTITCRASQDISNFLNWYQQKPGQPVKLLIYYTSRLHSGVPSRFSGSGSGTDFTLTISSLQPEDFATYYCQQGHTLPYTFGQGTKLEIK

SEQ ID NO: 19 - protein, 227 aa, synthetic construct
QVQLQESGPGLVKPSQTLSLTCTVTGYSITSGYYWNWIRQPPGKGLEWIGYITFDGANNYNPSLKNRVSISRDTSKNQFSLKLSSVTAEDTATYYCTRSSYDYDVLDYWGQGTTVTVSSASTKGPSVFPLAPSSKSTSGGTAALGCLVKDYFPEPVTVSWNSGALTSGVHTFPAVLQSSGLYSLSSVVTVPSSSLGTQTYICNVNHKPSNTKVDKKVEPKSCDKTHT

SEQ ID NO: 20 - protein, 214 aa, synthetic construct
DIQMTQSPSSLSASVGDRVTITCRASQDISNFLNWYQQKPGQPVKLLIYYTSRLHSGVPSRFSGSGSGTDFTLTISSLQPEDFATYYCQQGHTLPYTFGQGTKLEIKRTVAAPSVFIFPPSDEQLKSGTASVVCLLNNFYPREAKVQWKVDNALQSGNSQESVTEQDSKDSTYSLSSTLTLSKADYEKHKVYACEVTHQGLSSPVTKSFNRGEC

SEQ ID NO: 21 - protein, 760 aa, Homo sapiens
MMDQARSAFSNLFGGEPLSYTRFSLARQVDGDNSHVEMKLAVDEEENADNNTKANVTKPKRCSGSICYGTIAVIVFFLIGFMIGYLGYCKGVEPKTECERLAGTESPVREEPGEDFPAARRLYWDDLKRKLSEKLDSTDFTGTIKLLNENSYVPREAGSQKDENLALYVENQFREFKLSKVWRDQHFVKIQVKDSAQNSVIIVDKNGRLVYLVENPGGYVAYSKAATVTGKLVHANFGTKKDFEDLYTPVNGSIVIVRAGKITFAEKVANAESLNAIGVLIYMDQTKFPIVNAELSFFGHAHLGTGDPYTPGFPSFNHTQFPPSRSSGLPNIPVQTISRAAAEKLFGNMEGDCPSDWKTDSTCRMVTSESKNVKLTVSNVLKEIKILNIFGVIKGFVEPDHYVVVGAQRDAWGPGAAKSGVGTALLLKLAQMFSDMVLKDGFQPSRSIIFASWSAGDFGSVGATEWLEGYLSSLHLKAFTYINLDKAVLGTSNFKVSASPLLYTLIEKTMQNVKHPVTGQFLYQDSNWASKVEKLTLDNAAFPFLAYSGIPAVSFCFCEDTDYPYLGTTMDTYKELIERIPELNKVARAAAEVAGQFVIKLTHDVELNLDYERYNSQLLSFVRDLNQYRADIKEMGLSLQWLYSARGDFFRATSRLTTDFGNAEKTDRFVMKKLNDRVMRVEYHFLSPYVSPKESPFRHVFWGSGSHTLPALLENLKLRKQNNGAFNETLFRNQLALATWTIQGAANALSGDVWDIDNEF

SEQ ID NO: 22 - DNA, 20 bp, synthetic construct
  source 1..20: mol_type = other DNA
caggatacatttctacagct

SEQ ID NO: 23 - DNA, 17 bp, synthetic construct
  source 1..17: mol_type = other DNA
ttaatgtttatcaggat

SEQ ID NO: 24 - DNA, 17 bp, synthetic construct
  source 1..17: mol_type = other DNA
ggatacatttctacagc

SEQ ID NO: 25 - DNA, 17 bp, synthetic construct
  source 1..17: mol_type = other DNA
ggatacatttctacagc

SEQ ID NO: 26 - DNA, 17 bp, synthetic construct
  source 1..17: mol_type = other DNA
ggatacatttctacagc

SEQ ID NO: 27 - DNA, 17 bp, synthetic construct
  source 1..17: mol_type = other DNA
agtgtttaatgtttatc

SEQ ID NO: 28 - DNA, 17 bp, synthetic construct
  source 1..17: mol_type = other DNA
agtgtttaatgtttatc

SEQ ID NO: 29 - DNA, 17 bp, synthetic construct
  source 1..17: mol_type = other DNA
agtgtttaatgtttatc

SEQ ID NO: 30 - DNA, 20 bp, synthetic construct
  source 1..20: mol_type = other DNA
tggattctgtacttttctca

SEQ ID NO: 31 - DNA, 20 bp, synthetic construct
  source 1..20: mol_type = other DNA
gtacttttctcatgtgcggc

SEQ ID NO: 32 - DNA, 20 bp, synthetic construct
  source 1..20: mol_type = other DNA
cttcacatttcgatccaaca

SEQ ID NO: 33 - DNA, 20 bp, synthetic construct
  source 1..20: mol_type = other DNA
gctaactggtttgcccttgc

SEQ ID NO: 34 - DNA, 20 bp, synthetic construct
  source 1..20: mol_type = other DNA
cccaaagggttaattaggat

SEQ ID NO: 35 - DNA, 20 bp, synthetic construct
  source 1..20: mol_type = other DNA
ctctccattatttcttcacg

SEQ ID NO: 36 - DNA, 20 bp, synthetic construct
  source 1..20: mol_type = other DNA
ctggtacagttgctgctgct

SEQ ID NO: 37 - DNA, 20 bp, synthetic construct
  source 1..20: mol_type = other DNA
ggagctggagaaccatgagc

SEQ ID NO: 38 - DNA, 20 bp, synthetic construct
  source 1..20: mol_type = other DNA
tgcatagattccatcaaaag

SEQ ID NO: 39 - DNA, 20 bp, synthetic construct
  source 1..20: mol_type = other DNA
gtgggatacaaattctaggc

SEQ ID NO: 40 - DNA, 20 bp, synthetic construct
  source 1..20: mol_type = other DNA
cccatacgcggtgaattctg

SEQ ID NO: 41 - DNA, 20 bp, synthetic construct
  source 1..20: mol_type = other DNA
ctgctaactggtttgccctt

SEQ ID NO: 42 - DNA, 20 bp, synthetic construct
  source 1..20: mol_type = other DNA
tgtacttcacatttggagcc

SEQ ID NO: 43 - DNA, 20 bp, synthetic construct
  source 1..20: mol_type = other DNA
cctatcatcattttccaggg

SEQ ID NO: 44 - DNA, 20 bp, synthetic construct
  source 1..20: mol_type = other DNA
tctgtacttttctcatgtgc

SEQ ID NO: 45 - DNA, 18 bp, synthetic construct
  source 1..18: mol_type = other DNA
gccttactctaggaccaa

SEQ ID NO: 46 - DNA, 16 bp, synthetic construct
  source 1..16: mol_type = other DNA
ggccccggccccggcc

SEQ ID NO: 47 - DNA, 20 bp, synthetic construct
  source 1..20: mol_type = other DNA
ccggccccggccccggcccc

SEQ ID NO: 48 - DNA, 19 bp, synthetic construct
  source 1..19: mol_type = other DNA
ggccccggccccggccccg

SEQ ID NO: 49 - DNA, 20 bp, synthetic construct
  source 1..20: mol_type = other DNA
gccttactctaggaccaaga

SEQ ID NO: 50 - DNA, 20 bp, synthetic construct
  source 1..20: mol_type = other DNA
gtttatctgaattcgccata

SEQ ID NO: 51 - DNA, 20 bp, synthetic construct
  source 1..20: mol_type = other DNA
gcaatgtcacctttcatacc

SEQ ID NO: 52 - DNA, 20 bp, synthetic construct
  source 1..20: mol_type = other DNA
gcaatgtcacctttcatacc

SEQ ID NO: 53 - RNA, 20 nt, synthetic construct
  source 1..20: mol_type = other RNA
ggcacaagggcacagacttc

SEQ ID NO: 54 - RNA, 20 nt, synthetic construct
  source 1..20: mol_type = other RNA
  modified_base 11: mod_base = OTHER; note = Thymine
  modified_base 15: mod_base = OTHER; note = Thymine
gtgcacacagtagatgaggg

SEQ ID NO: 55 - DNA, 22 bp, synthetic construct
  source 1..22: mol_type = other DNA
gctgctgctgctgctgctgctg

SEQ ID NO: 56 - DNA, 22 bp, synthetic construct
  source 1..22: mol_type = other DNA
gctgctgctgctgctgctgctg

SEQ ID NO: 57 - DNA, 18 bp, synthetic construct
  source 1..18: mol_type = other DNA
gctattaccttaacccag

SEQ ID NO: 58 - DNA, 18 bp, synthetic construct
  source 1..18: mol_type = other DNA
accttatctgcacggttg

SEQ ID NO: 59 - DNA, 20 bp, synthetic construct
  source 1..20: mol_type = other DNA
ctcagtaacattgacaccac

SEQ ID NO: 60 - DNA, 20 bp, synthetic construct
  source 1..20: mol_type = other DNA
ctcagtaacattgacaccac

SEQ ID NO: 61 - DNA, 20 bp, synthetic construct
  source 1..20: mol_type = other DNA
ctcgactaaagcaggatttc

SEQ ID NO: 62 - DNA, 20 bp, synthetic construct
  source 1..20: mol_type = other DNA
ccttccctgaaggttcctcc

SEQ ID NO: 63 - DNA, 20 bp, synthetic construct
  source 1..20: mol_type = other DNA
gcagggttaccgccatcccc

SEQ ID NO: 64 - DNA, 20 bp, synthetic construct
  source 1..20: mol_type = other DNA
cgagacagtcgcttccactt

SEQ ID NO: 65 - DNA, 20 bp, synthetic construct
  source 1..20: mol_type = other DNA
ctcagtaacattgacaccac

SEQ ID NO: 66 - RNA, 37 nt, synthetic construct
  source 1..37: mol_type = other RNA
taagagatggggacagtacttcaacgctagaagaaca

SEQ ID NO: 67 - DNA, 20 bp, synthetic construct
  source 1..20: mol_type = other DNA
ggactgctctctttctcaca

SEQ ID NO: 68 - DNA, 20 bp, synthetic construct
  source 1..20: mol_type = other DNA
tccacatttctgaatcccag

SEQ ID NO: 69 - DNA, 20 bp, synthetic construct
  source 1..20: mol_type = other DNA
ggactgctctctttctcaca

SEQ ID NO: 70 - DNA, 20 bp, synthetic construct
  source 1..20: mol_type = other DNA
tccacatttctgaatcccag

SEQ ID NO: 71 - DNA, 20 bp, synthetic construct
  source 1..20: mol_type = other DNA
acgcacttaacaatatcata

SEQ ID NO: 72 - DNA, 20 bp, synthetic construct
  source 1..20: mol_type = other DNA
gctcatatctaaagaccgca

SEQ ID NO: 73 - DNA, 20 bp, synthetic construct
  source 1..20: mol_type = other DNA
tcaccacaaactcatggact

SEQ ID NO: 74 - DNA, 20 bp, synthetic construct
  source 1..20: mol_type = other DNA
accctttccatgtgaacatt

SEQ ID NO: 75 - DNA, 20 bp, synthetic construct
  source 1..20: mol_type = other DNA
agcaatcattggtagcatac

SEQ ID NO: 76 - DNA, 20 bp, synthetic construct
  source 1..20: mol_type = other DNA
cgcacttaacaatatcatat

SEQ ID NO: 77 - DNA, 20 bp, synthetic construct
  source 1..20: mol_type = other DNA
acagatatttttgttctgcc

SEQ ID NO: 78 - DNA, 20 bp, synthetic construct
  source 1..20: mol_type = other DNA
cagactgtaatctaggaccc

SEQ ID NO: 79 - DNA, 20 bp, synthetic construct
  source 1..20: mol_type = other DNA
acgacattttcttgcctctt

SEQ ID NO: 80 - DNA, 20 bp, synthetic construct
  source 1..20: mol_type = other DNA
gttttcatcaatatctgcaa

SEQ ID NO: 81 - DNA, 20 bp, synthetic construct
  source 1..20: mol_type = other DNA
tgaattcctttacaccacac

SEQ ID NO: 82 - DNA, 20 bp, synthetic construct
  source 1..20: mol_type = other DNA
gttttcatcaatatctgcaa

SEQ ID NO: 83 - DNA, 20 bp, synthetic construct
  source 1..20: mol_type = other DNA
acagatatttttgttctgcc

SEQ ID NO: 84 - protein, 20 aa, synthetic construct
KGAEEMETVIPVDVMRRAGI

SEQ ID NO: 85 - protein, 20 aa, synthetic construct
EGPYDVVVLPGGNLGAQNLS

SEQ ID NO: 86 - protein, 13 aa, synthetic construct
KGAEEMETVIPVD

SEQ ID NO: 87 - DNA, 16 bp, synthetic construct
  source 1..16: mol_type = other DNA
acaataaataccgagg

SEQ ID NO: 88 - DNA, 20 bp, synthetic construct
  source 1..20: mol_type = other DNA
cggagcggttgtgaactggc

SEQ ID NO: 89 - DNA, 20 bp, synthetic construct
  source 1..20: mol_type = other DNA
gcgcaccttcccgaatgtcc

SEQ ID NO: 90 - DNA, 16 bp, synthetic construct
  source 1..16: mol_type = other DNA
cccgaatgtccgacag

SEQ ID NO: 91 - DNA, 17 bp, synthetic construct
  source 1..17: mol_type = other DNA
cggagcggttgtgaact

SEQ ID NO: 92 - DNA, 17 bp, synthetic construct
  source 1..17: mol_type = other DNA
acaataaataccgagga

SEQ ID NO: 93 - DNA, 16 bp, synthetic construct
  source 1..16: mol_type = other DNA
gacaatctccgccagg

SEQ ID NO: 94 - DNA, 16 bp, synthetic construct
  source 1..16: mol_type = other DNA
tcccgaatgtccgaca

SEQ ID NO: 95 - DNA, 16 bp, synthetic construct
  source 1..16: mol_type = other DNA
tgtaatgttgtccagt

SEQ ID NO: 96 - DNA, 16 bp, synthetic construct
  source 1..16: mol_type = other DNA
gtgtaatgttgtccag

SEQ ID NO: 97 - RNA, 20 nt, synthetic construct
  source 1..20: mol_type = other RNA
tcaaggaagatggcatttct

SEQ ID NO: 98 - RNA, 20 nt, synthetic construct
  source 1..20: mol_type = other RNA
tcaaggaagatggcatttct

SEQ ID NO: 99 - RNA, 20 nt, synthetic construct
  source 1..20: mol_type = other RNA
  modified_base 5: mod_base = OTHER; note = Thymine
  modified_base 8..9: mod_base = OTHER; note = Thymine
  modified_base 11..12: mod_base = OTHER; note = Thymine
  modified_base 14..15: mod_base = OTHER; note = Thymine
cttcttcttcttcttcttct

SEQ ID NO: 100 - RNA, 20 nt, synthetic construct
  source 1..20: mol_type = other RNA
  modified_base 7..8: mod_base = OTHER; note = Thymine
  modified_base 10..11: mod_base = OTHER; note = Thymine
  modified_base 13..14: mod_base = OTHER; note = Thymine
ttcttcttcttcttcttctt

SEQ ID NO: 101 - RNA, 20 nt, synthetic construct
  source 1..20: mol_type = other RNA
  modified_base 6..7: mod_base = OTHER; note = Thymine
  modified_base 9..10: mod_base = OTHER; note = Thymine
  modified_base 12..13: mod_base = OTHER; note = Thymine
  modified_base 15: mod_base = OTHER; note = Thymine
tcttcttcttcttcttcttc

SEQ ID NO: 102 - RNA, 20 nt, synthetic construct
  source 1..20: mol_type = other RNA
cttcttcttcttcttcttct

SEQ ID NO: 103 - RNA, 20 nt, synthetic construct
  source 1..20: mol_type = other RNA
ttcttcttcttcttcttctt

SEQ ID NO: 104 - RNA, 20 nt, synthetic construct
  source 1..20: mol_type = other RNA
tcttcttcttcttcttcttc

SEQ ID NO: 105 - RNA, 20 nt, synthetic construct
  source 1..20: mol_type = other RNA
  modified_base 5..6: mod_base = OTHER; note = Thymine
  modified_base 8..9: mod_base = OTHER; note = Thymine
  modified_base 11..12: mod_base = OTHER; note = Thymine
  modified_base 14..15: mod_base = OTHER; note = Thymine
  modified_base 17: mod_base = OTHER; note = Thymine
cttcttcttcttcttcttct

SEQ ID NO: 106 - RNA, 20 nt, synthetic construct
  source 1..20: mol_type = other RNA
  modified_base 4..5: mod_base = OTHER; note = Thymine
  modified_base 7..8: mod_base = OTHER; note = Thymine
  modified_base 10..11: mod_base = OTHER; note = Thymine
  modified_base 13..14: mod_base = OTHER; note = Thymine
  modified_base 16..17: mod_base = OTHER; note = Thymine
ttcttcttcttcttcttctt

SEQ ID NO: 107 - RNA, 20 nt, synthetic construct
  source 1..20: mol_type = other RNA
  modified_base 4: mod_base = OTHER; note = Thymine
  modified_base 6..7: mod_base = OTHER; note = Thymine
  modified_base 9..10: mod_base = OTHER; note = Thymine
  modified_base 12..13: mod_base = OTHER; note = Thymine
  modified_base 15..16: mod_base = OTHER; note = Thymine
tcttcttcttcttcttcttc

SEQ ID NO: 108 - RNA, 20 nt, synthetic construct
  source 1..20: mol_type = other RNA
  modified_base 6: mod_base = OTHER; note = Thymine
  modified_base 8..9: mod_base = OTHER; note = Thymine
  modified_base 11..12: mod_base = OTHER; note = Thymine
  modified_base 14..15: mod_base = OTHER; note = Thymine
cttcttcttcttcttcttct

SEQ ID NO: 109 - RNA, 20 nt, synthetic construct
  source 1..20: mol_type = other RNA
  modified_base 7..8: mod_base = OTHER; note = Thymine
  modified_base 10..11: mod_base = OTHER; note = Thymine
  modified_base 13..14: mod_base = OTHER; note = Thymine
ttcttcttcttcttcttctt

SEQ ID NO: 110 - RNA, 20 nt, synthetic construct
  source 1..20: mol_type = other RNA
  modified_base 6..7: mod_base = OTHER; note = Thymine
  modified_base 9..10: mod_base = OTHER; note = Thymine
  modified_base 12..13: mod_base = OTHER; note = Thymine
  modified_base 15: mod_base = OTHER; note = Thymine
tcttcttcttcttcttcttc

SEQ ID NO: 111 - RNA, 20 nt, synthetic construct
  source 1..20: mol_type = other RNA
cttcttcttcttcttcttct

SEQ ID NO: 112 - RNA, 20 nt, synthetic construct
  source 1..20: mol_type = other RNA
ttcttcttcttcttcttctt

SEQ ID NO: 113 - RNA, 20 nt, synthetic construct
  source 1..20: mol_type = other RNA
tcttcttcttcttcttcttc

SEQ ID NO: 114 - DNA, 20 bp, synthetic construct
  source 1..20: mol_type = other DNA
cttcttcttcttcttcttct

SEQ ID NO: 115 - DNA, 20 bp, synthetic construct
  source 1..20: mol_type = other DNA
ttcttcttcttcttcttctt

SEQ ID NO: 116 - DNA, 20 bp, synthetic construct
  source 1..20: mol_type = other DNA
tcttcttcttcttcttcttc

SEQ ID NO: 117 - DNA, 20 bp, synthetic construct
  source 1..20: mol_type = other DNA
gtctgccagcattatgaaag

SEQ ID NO: 118 - DNA, 20 bp, synthetic construct
  source 1..20: mol_type = other DNA
tctgccagcattatgaaagt

SEQ ID NO: 119 - DNA, 19 bp, synthetic construct
  source 1..19: mol_type = other DNA
tctgccagcattatgaaag

SEQ ID NO: 120 - DNA, 20 bp, synthetic construct
  source 1..20: mol_type = other DNA
ctgccagcattatgaaagtg

SEQ ID NO: 121 - DNA, 19 bp, synthetic construct
  source 1..19: mol_type = other DNA
ctgccagcattatgaaagt

SEQ ID NO: 122 - DNA, 18 bp, synthetic construct
  source 1..18: mol_type = other DNA
ctgccagcattatgaaag

SEQ ID NO: 123 - DNA, 20 bp, synthetic construct
  source 1..20: mol_type = other DNA
tgccagcattatgaaagtga

SEQ ID NO: 124 - DNA, 19 bp, synthetic construct
  source 1..19: mol_type = other DNA
tgccagcattatgaaagtg

SEQ ID NO: 125 - DNA, 18 bp, synthetic construct
  source 1..18: mol_type = other DNA
tgccagcattatgaaagt

SEQ ID NO: 126 - DNA, 17 bp, synthetic construct
  source 1..17: mol_type = other DNA
tgccagcattatgaaag

SEQ ID NO: 127 - DNA, 20 bp, synthetic construct
  source 1..20: mol_type = other DNA
gccagcattatgaaagtgaa

SEQ ID NO: 128 - DNA, 19 bp, synthetic construct
  source 1..19: mol_type = other DNA
gccagcattatgaaagtga

SEQ ID NO: 129 - DNA, 18 bp, synthetic construct
  source 1..18: mol_type = other DNA
gccagcattatgaaagtg

SEQ ID NO: 130 - DNA, 17 bp, synthetic construct
  source 1..17: mol_type = other DNA
gccagcattatgaaagt

SEQ ID NO: 131 - DNA, 16 bp, synthetic construct
  source 1..16: mol_type = other DNA
gccagcattatgaaag

SEQ ID NO: 132 - DNA, 20 bp, synthetic construct
  source 1..20: mol_type = other DNA
ccagcattatgaaagtgaat

SEQ ID NO: 133 - DNA, 18 bp, synthetic construct
  source 1..18: mol_type = other DNA
ccagcattatgaaagtga

SEQ ID NO: 134 - DNA, 17 bp, synthetic construct
  source 1..17: mol_type = other DNA
ccagcattatgaaagtg

SEQ ID NO: 135 - DNA, 16 bp, synthetic construct
  source 1..16: mol_type = other DNA
ccagcattatgaaagt

SEQ ID NO: 136 - DNA, 15 bp, synthetic construct
  source 1..15: mol_type = other DNA
ccagcattatgaaag

SEQ ID NO: 137 - DNA, 20 bp, synthetic construct
  source 1..20: mol_type = other DNA
cagcattatgaaagtgaatc

SEQ ID NO: 138 - DNA, 19 bp, synthetic construct
  source 1..19: mol_type = other DNA
cagcattatgaaagtgaat

SEQ ID NO: 139 - DNA, 17 bp, synthetic construct
  source 1..17: mol_type = other DNA
cagcattatgaaagtga

SEQ ID NO: 140 - DNA, 16 bp, synthetic construct
  source 1..16: mol_type = other DNA
cagcattatgaaagtg

SEQ ID NO: 141 - DNA, 15 bp, synthetic construct
  source 1..15: mol_type = other DNA
cagcattatgaaagt

SEQ ID NO: 142 - DNA, 20 bp, synthetic construct
  source 1..20: mol_type = other DNA
atggagtgtatccccgacgc

SEQ ID NO: 143 - DNA, 25 bp, synthetic construct
  source 1..25: mol_type = other DNA
cctgttccaggcctcatgttttggg

SEQ ID NO: 144 - DNA, 25 bp, synthetic construct
  source 1..25: mol_type = other DNA
gggcgtctgtgtgcagaaccaccca

SEQ ID NO: 145 - DNA, 23 bp, synthetic construct
  source 1..23: mol_type = other DNA
agtggctgcctctctggcctgcc

SEQ ID NO: 146 - DNA, 23 bp, synthetic construct
  source 1..23: mol_type = other DNA
tctggcctgcccctgttccaggc

SEQ ID NO: 147 - DNA, 23 bp, synthetic construct
  source 1..23: mol_type = other DNA
ggcaggccagagaggcagccact

SEQ ID NO: 148 - DNA, 23 bp, synthetic construct
  source 1..23: mol_type = other DNA
gcctggaacaggggcaggccaga

SEQ ID NO: 149 - DNA, 18 bp, synthetic construct
  source 1..18: mol_type = other DNA
ccgttttcttaccaccct

SEQ ID NO: 150 - DNA, 20 bp, synthetic construct
  source 1..20: mol_type = other DNA
gcattctcttatattcctta

SEQ ID NO: 151 - DNA, 20 bp, synthetic construct
  source 1..20: mol_type = other DNA
gtttacctttaacattcctc

SEQ ID NO: 152 - DNA, 20 bp, synthetic construct
  source 1..20: mol_type = other DNA
gccatattgtcattttacac

SEQ ID NO: 153 - DNA, 20 bp, synthetic construct
  source 1..20: mol_type = other DNA
gtatcctcttaattcctata

SEQ ID NO: 154 - DNA, 20 bp, synthetic construct
  source 1..20: mol_type = other DNA
ctccaattttaacttgcacc

SEQ ID NO: 155 - DNA, 20 bp, synthetic construct
  source 1..20: mol_type = other DNA
gttcacagtttaccccaagc

SEQ ID NO: 156 - DNA, 18 bp, synthetic construct
  source 1..18: mol_type = other DNA
ctgcaaagaacaccttga

SEQ ID NO: 157 - DNA, 18 bp, synthetic construct
  source 1..18: mol_type = other DNA
atcttctgcaaagaacac

SEQ ID NO: 158 - RNA, 21 nt, synthetic construct
  source 1..21: mol_type = other RNA
  modified_base 20..21: mod_base = OTHER; note = Thymine
ccctctagatgaccaagattt

SEQ ID NO: 159 - RNA, 21 nt, synthetic construct
  source 1..21: mol_type = other RNA
  modified_base 20: mod_base = OTHER; note = Thymine
atcttggtcatctagagggtc

SEQ ID NO: 160 - RNA, 21 nt, synthetic construct
  source 1..21: mol_type = other RNA
  modified_base 20..21: mod_base = OTHER; note = Thymine
gcgttctcctgagcaagtttt

SEQ ID NO: 161 - RNA, 21 nt, synthetic construct
  source 1..21: mol_type = other RNA
aacttgctcaggagaacgcag

SEQ ID NO: 162 - RNA, 21 nt, synthetic construct
  source 1..21: mol_type = other RNA
  modified_base 20..21: mod_base = OTHER; note = Thymine
gcacctccaggaatcaagatt

SEQ ID NO: 163 - RNA, 21 nt, synthetic construct
  source 1..21: mol_type = other RNA
  modified_base 20: mod_base = OTHER; note = Thymine
tcttgattcctggaggtgctg

SEQ ID NO: 164-169 - skipped (6 entries)

SEQ ID NO: 170 - RNA, 21 nt, synthetic construct
  source 1..21: mol_type = other RNA
  modified_base 20..21: mod_base = OTHER; note = Thymine
gaccatgaaggagttgaagtt

SEQ ID NO: 171 - DNA, 21 bp, synthetic construct
  source 1..21: mol_type = other DNA
aaggtggagcaagcggtggag

SEQ ID NO: 172 - DNA, 19 bp, synthetic construct
  source 1..19: mol_type = other DNA
ggagttgaaggcctacaaa

SEQ ID NO: 173 - DNA, 21 bp, synthetic construct
  source 1..21: mol_type = other DNA
aagcagtttgcctgcagagat

SEQ ID NO: 174 - protein, 17 aa, synthetic construct
VHHQKLPFFAEDVGSNK

SEQ ID NO: 175 - protein, 15 aa, synthetic construct
KEESIYCRLMGLGCG

SEQ ID NO: 176 - protein, 15 aa, synthetic construct
NELSPYCRLMGLGCD

SEQ ID NO: 177 - protein, 15 aa, synthetic construct
NEESMYCRLLGIGCG

SEQ ID NO: 178 - protein, 15 aa, synthetic construct
PEESLYCRLLALGCG

SEQ ID NO: 179 - protein, 12 aa, synthetic construct
SMYCRLLGIGCG

SEQ ID NO: 180 - protein, 13 aa, synthetic construct
ESMYCRLLGIGCG

SEQ ID NO: 181 - DNA, 18 bp, synthetic construct
  source 1..18: mol_type = other DNA
agttggagcaagattatc

SEQ ID NO: 182 - DNA, 18 bp, synthetic construct
  source 1..18: mol_type = other DNA
agttggagcaagattatc

SEQ ID NO: 183 - DNA, 18 bp, synthetic construct
  source 1..18: mol_type = other DNA
agttggagcaagattatc

SEQ ID NO: 184 - DNA, 18 bp, synthetic construct
  source 1..18: mol_type = other DNA
agttggagcaagattatc

SEQ ID NO: 185 - DNA, 18 bp, synthetic construct
  source 1..18: mol_type = other DNA
agttggagcaagattatc

SEQ ID NO: 186 - DNA, 18 bp, synthetic construct
  source 1..18: mol_type = other DNA
agttggagcaagattatc

SEQ ID NO: 187 - DNA, 18 bp, synthetic construct
  source 1..18: mol_type = other DNA
agttggagcaagattatc

SEQ ID NO: 188 - DNA, 18 bp, synthetic construct
  source 1..18: mol_type = other DNA
agttggagcaagattatc

SEQ ID NO: 189 - DNA, 18 bp, synthetic construct
  source 1..18: mol_type = other DNA
agttggagcaagattatc

SEQ ID NO: 190 - DNA, 18 bp, synthetic construct
  source 1..18: mol_type = other DNA
agttggagcaagattatc

SEQ ID NO: 191 - DNA, 18 bp, synthetic construct
  source 1..18: mol_type = other DNA
agttggagcaagattatc

SEQ ID NO: 192 - DNA, 18 bp, synthetic construct
  source 1..18: mol_type = other DNA
agttggagcaagattatc

SEQ ID NO: 193 - DNA, 18 bp, synthetic construct
  source 1..18: mol_type = other DNA
agttggagcaagattatc

SEQ ID NO: 194 - DNA, 18 bp, synthetic construct
  source 1..18: mol_type = other DNA
agttggagcaagattatc

SEQ ID NO: 195 - DNA, 18 bp, synthetic construct
  source 1..18: mol_type = other DNA
agttggagcaagattatc

SEQ ID NO: 196 - DNA, 18 bp, synthetic construct
  source 1..18: mol_type = other DNA
agttggagcaagattatc

SEQ ID NO: 197 - DNA, 18 bp, synthetic construct
  source 1..18: mol_type = other DNA
agttggagcaagattatc

SEQ ID NO: 198 - DNA, 18 bp, synthetic construct
  source 1..18: mol_type = other DNA
agttggagcaagattatc

SEQ ID NO: 199 - DNA, 18 bp, synthetic construct
  source 1..18: mol_type = other DNA
agttggagcaagattatc

SEQ ID NO: 200 - DNA, 18 bp, synthetic construct
  source 1..18: mol_type = other DNA
agttggagcaagattatc

SEQ ID NO: 201 - DNA, 18 bp, synthetic construct
  source 1..18: mol_type = other DNA
agttggagcaagattatc

SEQ ID NO: 202 - DNA, 18 bp, synthetic construct
  source 1..18: mol_type = other DNA
agttggagcaagattatc

SEQ ID NO: 203 - DNA, 20 bp, synthetic construct
  source 1..20: mol_type = other DNA
aagttggagcaagattatcc

SEQ ID NO: 204 - DNA, 19 bp, synthetic construct
  source 1..19: mol_type = other DNA
agttggagcaagattatcc

SEQ ID NO: 205 - DNA, 19 bp, synthetic construct
  source 1..19: mol_type = other DNA
aagttggagcaagattatc

SEQ ID NO: 206 - DNA, 18 bp, synthetic construct
  source 1..18: mol_type = other DNA
ggtagcaaaaggggtaat

SEQ ID NO: 207 - DNA, 18 bp, synthetic construct
  source 1..18: mol_type = other DNA
agcaaaaggggtaataca

SEQ ID NO: 208 - DNA, 18 bp, synthetic construct
  source 1..18: mol_type = other DNA
gcaaaaggggtaatacag

SEQ ID NO: 209 - DNA, 18 bp, synthetic construct
  source 1..18: mol_type = other DNA
caaaaggggtaatacagt

SEQ ID NO: 210 - DNA, 18 bp, synthetic construct
  source 1..18: mol_type = other DNA
aaaggggtaatacagtac

SEQ ID NO: 211 - DNA, 18 bp, synthetic construct
  source 1..18: mol_type = other DNA
aaggggtaatacagtacc

SEQ ID NO: 212 - DNA, 18 bp, synthetic construct
  source 1..18: mol_type = other DNA
gtaatacagtacccataa

SEQ ID NO: 213 - DNA, 18 bp, synthetic construct
  source 1..18: mol_type = other DNA
taatacagtacccataat

SEQ ID NO: 214 - DNA, 18 bp, synthetic construct
  source 1..18: mol_type = other DNA
aatacagtacccataata

SEQ ID NO: 215 - DNA, 18 bp, synthetic construct
  source 1..18: mol_type = other DNA
atacagtacccataataa

SEQ ID NO: 216 - DNA, 18 bp, synthetic construct
  source 1..18: mol_type = other DNA
tacagtacccataataaa

SEQ ID NO: 217 - DNA, 18 bp, synthetic construct
  source 1..18: mol_type = other DNA
acagtacccataataaag

SEQ ID NO: 218 - DNA, 18 bp, synthetic construct
  source 1..18: mol_type = other DNA
cccatccaagttggagca

SEQ ID NO: 219 - DNA, 18 bp, synthetic construct
  source 1..18: mol_type = other DNA
ccatccaagttggagcaa

SEQ ID NO: 220 - DNA, 18 bp, synthetic construct
  source 1..18: mol_type = other DNA
catccaagttggagcaag

SEQ ID NO: 221 - DNA, 18 bp, synthetic construct
  source 1..18: mol_type = other DNA
atccaagttggagcaaga

SEQ ID NO: 222 - DNA, 18 bp, synthetic construct
  source 1..18: mol_type = other DNA
tccaagttggagcaagat

SEQ ID NO: 223 - DNA, 18 bp, synthetic construct
  source 1..18: mol_type = other DNA
ccaagttggagcaagatt

SEQ ID NO: 224 - DNA, 18 bp, synthetic construct
  source 1..18: mol_type = other DNA
caagttggagcaagatta

SEQ ID NO: 225 - DNA, 18 bp, synthetic construct
  source 1..18: mol_type = other DNA
aagttggagcaagattat

SEQ ID NO: 226 - DNA, 18 bp, synthetic construct
  source 1..18: mol_type = other DNA
ttggagcaagattatcct

SEQ ID NO: 227 - DNA, 18 bp, synthetic construct
  source 1..18: mol_type = other DNA
tggagcaagattatccta

SEQ ID NO: 228 - DNA, 18 bp, synthetic construct
  source 1..18: mol_type = other DNA
ggagcaagattatcctat

SEQ ID NO: 229 - DNA, 18 bp, synthetic construct
  source 1..18: mol_type = other DNA
gagcaagattatcctata

SEQ ID NO: 230 - DNA, 20 bp, synthetic construct
  source 1..20: mol_type = other DNA
gcataatcccattatacaaa

SEQ ID NO: 231 - DNA, 20 bp, synthetic construct
  source 1..20: mol_type = other DNA
cacgacatatttttctacac

SEQ ID NO: 232 - DNA, 20 bp, synthetic construct
  source 1..20: mol_type = other DNA
ccacgacatatttttctaca

SEQ ID NO: 233 - DNA, 20 bp, synthetic construct
  source 1..20: mol_type = other DNA
tctgcatgtaacctttatac

SEQ ID NO: 234 - DNA, 20 bp, synthetic construct
  source 1..20: mol_type = other DNA
gcataatcccattatacaaa

SEQ ID NO: 235 - DNA, 18 bp, synthetic construct
  source 1..18: mol_type = other DNA
ctgcatgtaacctttata

SEQ ID NO: 236 - DNA, 20 bp, synthetic construct
  source 1..20: mol_type = other DNA
gacgattagtgacataggct

SEQ ID NO: 237 - DNA, 20 bp, synthetic construct
  source 1..20: mol_type = other DNA
gacgattagtgacataggct

SEQ ID NO: 238 - RNA, 79 nt, synthetic construct
  source 1..79: mol_type = other RNA
tgataaggctcttaagggtctcaaagctcttagggtcctaagggactttatggcacctagttccgagtagcccagggca

SEQ ID NO: 239 - RNA, 24 nt, synthetic construct
  source 1..24: mol_type = other RNA
gcacctagttccgagtagcccagg

SEQ ID NO: 240 - RNA, 24 nt, synthetic construct
  source 1..24: mol_type = other RNA
cacctagttccgagtagcccaggg

SEQ ID NO: 241 - RNA, 23 nt, synthetic construct
  source 1..23: mol_type = other RNA
acctagttccgagtagcccaggg

SEQ ID NO: 242 - RNA, 22 nt, synthetic construct
  source 1..22: mol_type = other RNA
cctagttccgagtagcccaggg

SEQ ID NO: 243 - RNA, 22 nt, synthetic construct
  source 1..22: mol_type = other RNA
ctagttccgagtagcccagggc

SEQ ID NO: 244 - RNA, 22 nt, synthetic construct
  source 1..22: mol_type = other RNA
tagttccgagtagcccagggca

SEQ ID NO: 245 - RNA, 21 nt, synthetic construct
  source 1..21: mol_type = other RNA
ctagttccgagtagcccaggg

SEQ ID NO: 246 - RNA, 20 nt, synthetic construct
  source 1..20: mol_type = other RNA
tagttccgagtagcccaggg

SEQ ID NO: 247 - RNA, 15 nt, synthetic construct
  source 1..15: mol_type = other RNA
tccgagtagcccagg

SEQ ID NO: 248 - DNA, 18 bp, synthetic construct
  source 1..18: mol_type = other DNA
acaaccctcccaaccacg

SEQ ID NO: 249 - DNA, 18 bp, synthetic construct
  source 1..18: mol_type = other DNA
gggacaaccctcccaacc

SEQ ID NO: 250 - DNA, 18 bp, synthetic construct
  source 1..18: mol_type = other DNA
aggggacaaccctcccaa

SEQ ID NO: 251 - DNA, 18 bp, synthetic construct
  source 1..18: mol_type = other DNA
cttccaggggacaaccct

SEQ ID NO: 252 - DNA, 18 bp, synthetic construct
  source 1..18: mol_type = other DNA
cagagcttccaggggaca

SEQ ID NO: 253 - DNA, 18 bp, synthetic construct
  source 1..18: mol_type = other DNA
gaccgcagagcttccagg

SEQ ID NO: 254 - DNA, 18 bp, synthetic construct
  source 1..18: mol_type = other DNA
agtgagaccgcagagctt

SEQ ID NO: 255 - DNA, 18 bp, synthetic construct
  source 1..18: mol_type = other DNA
aatagagtgagaccgcag

SEQ ID NO: 256 - DNA, 18 bp, synthetic construct
  source 1..18: mol_type = other DNA
aggagaatagagtgagac

SEQ ID NO: 257 - DNA, 18 bp, synthetic construct
  source 1..18: mol_type = other DNA
gggacaggagaatagagt

SEQ ID NO: 258 - DNA, 18 bp, synthetic construct
  source 1..18: mol_type = other DNA
agcctgggacaggagaat

SEQ ID NO: 259 - DNA, 18 bp, synthetic construct
  source 1..18: mol_type = other DNA
agcacagcctgggacagg

SEQ ID NO: 260 - DNA, 18 bp, synthetic construct
  source 1..18: mol_type = other DNA
ccaggagcacagcctggg

SEQ ID NO: 261 - DNA, 18 bp, synthetic construct
  source 1..18: mol_type = other DNA
gtccgccaggagcacagc

SEQ ID NO: 262 - DNA, 18 bp, synthetic construct
  source 1..18: mol_type = other DNA
aggatgtccgccaggagc

SEQ ID NO: 263 - DNA, 18 bp, synthetic construct
  source 1..18: mol_type = other DNA
gggaggatgtccgccagg

SEQ ID NO: 264 - DNA, 18 bp, synthetic construct
  source 1..18: mol_type = other DNA
tggggaggatgtccgcca

SEQ ID NO: 265 - DNA, 18 bp, synthetic construct
  source 1..18: mol_type = other DNA
gagtgtggggaggatgtc

SEQ ID NO: 266 - DNA, 18 bp, synthetic construct
  source 1..18: mol_type = other DNA
atgacgagtgtggggagg

SEQ ID NO: 267 - DNA, 18 bp, synthetic construct
  source 1..18: mol_type = other DNA
atttgatgacgagtgtgg

SEQ ID NO: 268 - DNA, 18 bp, synthetic construct
  source 1..18: mol_type = other DNA
caacaatttgatgacgag

SEQ ID NO: 269 - DNA, 18 bp, synthetic construct
  source 1..18: mol_type = other DNA
ggagccaacaatttgatg

SEQ ID NO: 270 - DNA, 18 bp, synthetic construct
  source 1..18: mol_type = other DNA
caagaggagccaacaatt

SEQ ID NO: 271 - DNA, 18 bp, synthetic construct
  source 1..18: mol_type = other DNA
aaggccaagaggagccaa

SEQ ID NO: 272 - DNA, 18 bp, synthetic construct
  source 1..18: mol_type = other DNA
aggtgaaggccaagagga

SEQ ID NO: 273 - DNA, 18 bp, synthetic construct
  source 1..18: mol_type = other DNA
gcagcaggtgaaggccaa

SEQ ID NO: 274 - DNA, 18 bp, synthetic construct
  source 1..18: mol_type = other DNA
gtagggcagcaggtgaag

SEQ ID NO: 275 - DNA, 18 bp, synthetic construct
  source 1..18: mol_type = other DNA
gacctgtagggcagcagg

SEQ ID NO: 276 - DNA, 18 bp, synthetic construct
  source 1..18: mol_type = other DNA
acccagacctgtagggca

SEQ ID NO: 277 - DNA, 18 bp, synthetic construct
  source 1..18: mol_type = other DNA
ccctcacccagacctgta

SEQ ID NO: 278 - DNA, 18 bp, synthetic construct
  source 1..18: mol_type = other DNA
cactaccctcacccagac

SEQ ID NO: 279 - DNA, 18 bp, synthetic construct
  source 1..18: mol_type = other DNA
cctcccactaccctcacc

SEQ ID NO: 280 - DNA, 18 bp, synthetic construct
  source 1..18: mol_type = other DNA
ccctgcctcccactaccc

SEQ ID NO: 281 - DNA, 18 bp, synthetic construct
  source 1..18: mol_type = other DNA
gcccaccctgcctcccac

SEQ ID NO: 282 - DNA, 18 bp, synthetic construct
  source 1..18: mol_type = other DNA
ctcctgcccaccctgcct

SEQ ID NO: 283 - DNA, 18 bp, synthetic construct
  source 1..18: mol_type = other DNA
ctcagctcctgcccaccc

SEQ ID NO: 284 - DNA, 18 bp, synthetic construct
  source 1..18: mol_type = other DNA
cctttctcagctcctgcc

SEQ ID NO: 285 - DNA, 18 bp, synthetic construct
  source 1..18: mol_type = other DNA
cctcccctttctcagctc

SEQ ID NO: 286 - DNA, 18 bp, synthetic construct
  source 1..18: mol_type = other DNA
cccagcctcccctttctc

SEQ ID NO: 287 - DNA, 18 bp, synthetic construct
  source 1..18: mol_type = other DNA
gccatcccagcctcccct

SEQ ID NO: 288 - RNA, 15 nt, synthetic construct
  source 1..15: mol_type = other RNA
tccgagtagcccagg

SEQ ID NO: 289 - RNA, 24 nt, synthetic construct
  source 1..24: mol_type = other RNA
gcacctagttccgagtagcccagg

SEQ ID NO: 290 - RNA, 24 nt, synthetic construct
  source 1..24: mol_type = other RNA
cacctagttccgagtagcccaggg

SEQ ID NO: 291 - RNA, 23 nt, synthetic construct
  source 1..23: mol_type = other RNA
acctagttccgagtagcccaggg

SEQ ID NO: 292 - RNA, 22 nt, synthetic construct
  source 1..22: mol_type = other RNA
cctagttccgagtagcccaggg

SEQ ID NO: 293 - RNA, 22 nt, synthetic construct
  source 1..22: mol_type = other RNA
ctagttccgagtagcccagggc

SEQ ID NO: 294 - RNA, 22 nt, synthetic construct
  source 1..22: mol_type = other RNA
tagttccgagtagcccagggca

SEQ ID NO: 295 - RNA, 21 nt, synthetic construct
  source 1..21: mol_type = other RNA
ctagttccgagtagcccaggg

SEQ ID NO: 296 - RNA, 20 nt, synthetic construct
  source 1..20: mol_type = other RNA
tagttccgagtagcccaggg

SEQ ID NO: 297 - RNA, 15 nt, synthetic construct
  source 1..15: mol_type = other RNA
tccgagtagcccagg

SEQ ID NO: 298 - RNA, 25 nt, synthetic construct
  source 1..25: mol_type = other RNA
  modified_base 25: mod_base = OTHER; note = Thymine
gtacacatctgctctgacctacgat

SEQ ID NO: 299 - RNA, 26 nt, synthetic construct
  source 1..26: mol_type = other RNA
atcgtaggtcagagcagatgtgtact

SEQ ID NO: 300 - protein, 13 aa, synthetic construct
ELYENKPRRPYIL

SEQ ID NO: 301 - DNA, 20 bp, synthetic construct
  source 1..20: mol_type = other DNA
catgcttcatttctttattg

SEQ ID NO: 302 - DNA, 20 bp, synthetic construct
  source 1..20: mol_type = other DNA
ccgactcaggtagggtgagc

SEQ ID NO: 303 - DNA, 20 bp, synthetic construct
  source 1..20: mol_type = other DNA
cttggtgaccggtagagtta

SEQ ID NO: 304 - DNA, 20 bp, synthetic construct
  source 1..20: mol_type = other DNA
gagaggcatggctactgcgg

SEQ ID NO: 305 - DNA, 20 bp, synthetic construct
  source 1..20: mol_type = other DNA
cggctgagaggcatggctac

SEQ ID NO: 306 - DNA, 20 bp, synthetic construct
  source 1..20: mol_type = other DNA
tcttccaatcctggaagcga

SEQ ID NO: 307 - DNA, 20 bp, synthetic construct
  source 1..20: mol_type = other DNA
atggtcccaccagatagtag

SEQ ID NO: 308 - DNA, 20 bp, synthetic construct
  source 1..20: mol_type = other DNA
cgtgtatggtcccaccagat

SEQ ID NO: 309 - DNA, 20 bp, synthetic construct
  source 1..20: mol_type = other DNA
aggtgttgagcctcgattgc

SEQ ID NO: 310 - DNA, 20 bp, synthetic construct
  source 1..20: mol_type = other DNA
tgactgtattggctgtgtcc

SEQ ID NO: 311 - DNA, 20 bp, synthetic construct
  source 1..20: mol_type = other DNA
ctccttgactgtattggctg

SEQ ID NO: 312 - DNA, 20 bp, synthetic construct
  source 1..20: mol_type = other DNA
gtagagcttcctcccaaatt

SEQ ID NO: 313 - DNA, 20 bp, synthetic construct
  source 1..20: mol_type = other DNA
cctccgatccagaatgtaaa

SEQ ID NO: 314 - DNA, 20 bp, synthetic construct
  source 1..20: mol_type = other DNA
acttccaatctagcaagtcc

SEQ ID NO: 315 - DNA, 20 bp, synthetic construct
  source 1..20: mol_type = other DNA
tcccgtggctcttcctcatc

SEQ ID NO: 316 - DNA, 20 bp, synthetic construct
  source 1..20: mol_type = other DNA
tgtggaggaggaacaggagg

SEQ ID NO: 317 - DNA, 20 bp, synthetic construct
  source 1..20: mol_type = other DNA
tgccacctgtggaggaggaa

SEQ ID NO: 318 - DNA, 20 bp, synthetic construct
  source 1..20: mol_type = other DNA
ctggagggcccagtgtccac

SEQ ID NO: 319 - DNA, 20 bp, synthetic construct
  source 1..20: mol_type = other DNA
gtgagctggagggcccagtg

SEQ ID NO: 320 - DNA, 20 bp, synthetic construct
  source 1..20: mol_type = other DNA
cataggccctctgcgagagg

SEQ ID NO: 321 - DNA, 20 bp, synthetic construct
  source 1..20: mol_type = other DNA
atctgcataggccctctgcg

SEQ ID NO: 322 - DNA, 20 bp, synthetic construct
  source 1..20: mol_type = other DNA
ttcaggcaccctcccatctg

SEQ ID NO: 323 - DNA, 20 bp, synthetic construct
  source 1..20: mol_type = other DNA
actcaagagtctggagtggg

SEQ ID NO: 324 - DNA, 20 bp, synthetic construct
  source 1..20: mol_type = other DNA
ggctggagtgtctgaaacag

SEQ ID NO: 325 - DNA, 20 bp, synthetic construct
  source 1..20: mol_type = other DNA
tggagctcaagggctggagt

SEQ ID NO: 326 - DNA, 20 bp, synthetic construct
  source 1..20: mol_type = other DNA
ccaagaaaggcacggcggcg

SEQ ID NO: 327 - DNA, 20 bp, synthetic construct
  source 1..20: mol_type = other DNA
ctggagactccagatcagtg

SEQ ID NO: 328 - DNA, 20 bp, synthetic construct
  source 1..20: mol_type = other DNA
aaacaatggcagatgcctgg

SEQ ID NO: 329 - DNA, 20 bp, synthetic construct
  source 1..20: mol_type = other DNA
cctaaaacctctggcattga

SEQ ID NO: 330 - DNA, 20 bp, synthetic construct
  source 1..20: mol_type = other DNA
cctggaagccaataaaccag

SEQ ID NO: 331 - DNA, 20 bp, synthetic construct
  source 1..20: mol_type = other DNA
gccacagcctggaagccaat

SEQ ID NO: 332 - DNA, 20 bp, synthetic construct
  source 1..20: mol_type = other DNA
gccacacagaatccaacatg

SEQ ID NO: 333 - DNA, 20 bp, synthetic construct
  source 1..20: mol_type = other DNA
tcgggaagccacacagaatc

SEQ ID NO: 334 - DNA, 20 bp, synthetic construct
  source 1..20: mol_type = other DNA
cctgaaatgtcctaactctg

SEQ ID NO: 335 - DNA, 20 bp, synthetic construct
  source 1..20: mol_type = other DNA
ttaatccctgaaatgtccta

SEQ ID NO: 336 - DNA, 20 bp, synthetic construct
  source 1..20: mol_type = other DNA
aatctgtcgacagagctact

SEQ ID NO: 337 - DNA, 20 bp, synthetic construct
  source 1..20: mol_type = other DNA
gacaagcaatctgtcgacag

SEQ ID NO: 338 - DNA, 20 bp, synthetic construct
  source 1..20: mol_type = other DNA
tgtgtatcaccgcaccaggt

SEQ ID NO: 339 - DNA, 20 bp, synthetic construct
  source 1..20: mol_type = other DNA
gaaatggaggaccgtgagca

SEQ ID NO: 340 - DNA, 20 bp, synthetic construct
  source 1..20: mol_type = other DNA
tgctcctttgaagaacacac

SEQ ID NO: 341 - DNA, 20 bp, synthetic construct
  source 1..20: mol_type = other DNA
gcagaaaggtgtctggtcca

SEQ ID NO: 342 - DNA, 20 bp, synthetic construct
  source 1..20: mol_type = other DNA
aaggcagaaaggtgtctggt

SEQ ID NO: 343 - DNA, 20 bp, synthetic construct
  source 1..20: mol_type = other DNA
tgacagacattctgccctca

SEQ ID NO: 344 - DNA, 20 bp, synthetic construct
  source 1..20: mol_type = other DNA
agtgggctgagcacttgtgg

SEQ ID NO: 345 - DNA, 20 bp, synthetic construct
  source 1..20: mol_type = other DNA
agccactgggacccagaacc

SEQ ID NO: 346 - DNA, 20 bp, synthetic construct
  source 1..20: mol_type = other DNA
ttcaagaagccggtgggctc

SEQ ID NO: 347 - DNA, 20 bp, synthetic construct
  source 1..20: mol_type = other DNA
gcagaaaggcctcgaggtac

SEQ ID NO: 348 - DNA, 20 bp, synthetic construct
  source 1..20: mol_type = other DNA
ccccccagggcctaggacgc

SEQ ID NO: 349 - DNA, 20 bp, synthetic construct
  source 1..20: mol_type = other DNA
acagcattgagtctgccatc

SEQ ID NO: 350 - DNA, 20 bp, synthetic construct
  source 1..20: mol_type = other DNA
tggcctgactggatgctgga

SEQ ID NO: 351 - DNA, 20 bp, synthetic construct
  source 1..20: mol_type = other DNA
attgatctaactctgtccca

SEQ ID NO: 352 - DNA, 20 bp, synthetic construct
  source 1..20: mol_type = other DNA
atccttggattaaaagagtg

SEQ ID NO: 353 - DNA, 20 bp, synthetic construct
  source 1..20: mol_type = other DNA
gaccaaaactcccagatttc

SEQ ID NO: 354 - DNA, 20 bp, synthetic construct
  source 1..20: mol_type = other DNA
agccacatgtagggaccaca

SEQ ID NO: 355 - DNA, 20 bp, synthetic construct
  source 1..20: mol_type = other DNA
catgcttcatttctttattg

SEQ ID NO: 356 - DNA, 20 bp, synthetic construct
  source 1..20: mol_type = other DNA
ggcccatgcttcatttcttt

SEQ ID NO: 357 - DNA, 20 bp, synthetic construct
  source 1..20: mol_type = other DNA
tcagagatagccagagagag

SEQ ID NO: 358 - DNA, 20 bp, synthetic construct
  source 1..20: mol_type = other DNA
ccctactgtctcatgactta

SEQ ID NO: 359 - DNA, 20 bp, synthetic construct
  source 1..20: mol_type = other DNA
gaggcctcagcaaatgccag

SEQ ID NO: 360 - DNA, 20 bp, synthetic construct
  source 1..20: mol_type = other DNA
cctccagcaatgtattttaa

SEQ ID NO: 361 - DNA, 20 bp, synthetic construct
  source 1..20: mol_type = other DNA
aggaatcagagggttctgtg

SEQ ID NO: 362 - DNA, 20 bp, synthetic construct
  source 1..20: mol_type = other DNA
agccctctcttttatgacaa

SEQ ID NO: 363 - DNA, 20 bp, synthetic construct
  source 1..20: mol_type = other DNA
acaagctaaagacttaaact

SEQ ID NO: 364 - DNA, 20 bp, synthetic construct
  source 1..20: mol_type = other DNA
gatttgcaagtgactctcaa

SEQ ID NO: 365 - DNA, 20 bp, synthetic construct
  source 1..20: mol_type = other DNA
tggattccctctgtagatca

SEQ ID NO: 366 - DNA, 20 bp, synthetic construct
  source 1..20: mol_type = other DNA
tgtctctagctctgacaaca

SEQ ID NO: 367 - DNA, 20 bp, synthetic construct
  source 1..20: mol_type = other DNA
ccagatgctatttctagatt

SEQ ID NO: 368 - DNA, 20 bp, synthetic construct
  source 1..20: mol_type = other DNA
actgctggagtccccagcaa

SEQ ID NO: 369 - DNA, 20 bp, synthetic construct
  source 1..20: mol_type = other DNA
gtgtcataattttcttagct

SEQ ID NO: 370 - DNA, 20 bp, synthetic construct
  source 1..20: mol_type = other DNA
gtcataattttcttagctac

SEQ ID NO: 371 - DNA, 20 bp, synthetic construct
  source 1..20: mol_type = other DNA
gcttattattcatgttctcc

SEQ ID NO: 372 - DNA, 19 bp, synthetic construct
  source 1..19: mol_type = other DNA
gtcataattttcttagcta

SEQ ID NO: 373 - DNA, 20 bp, synthetic construct
  source 1..20: mol_type = other DNA
acgtccattttctgtgcttt

SEQ ID NO: 374 - DNA, 20 bp, synthetic construct
  source 1..20: mol_type = other DNA
cagtattacctctactagtc

SEQ ID NO: 375 - RNA, 21 nt, synthetic construct
  source 1..21: mol_type = other RNA
  modified_base 20..21: mod_base = OTHER; note = Thymine
ccacgagtcaaacctttattt

SEQ ID NO: 376 - RNA, 21 nt, synthetic construct
  source 1..21: mol_type = other RNA
  modified_base 20..21: mod_base = OTHER; note = Thymine
ataaaggtttgactcgtggtt

SEQ ID NO: 377 - DNA, 20 bp, synthetic construct
  source 1..20: mol_type = other DNA
accattttgaccttcttagc

SEQ ID NO: 378 - DNA, 20 bp, synthetic construct
  source 1..20: mol_type = other DNA
catcatgatcttggtaaggc

SEQ ID NO: 379 - DNA, 20 bp, synthetic construct
  source 1..20: mol_type = other DNA
tcaccattttgaccttctta

SEQ ID NO: 380 - DNA, 20 bp, synthetic construct
  source 1..20: mol_type = other DNA
ttcaccattttgaccttctt

SEQ ID NO: 381 - DNA, 20 bp, synthetic construct
  source 1..20: mol_type = other DNA
gcatacccagggtaggattc

SEQ ID NO: 382 - DNA, 18 bp, synthetic construct
  source 1..18: mol_type = other DNA
acgcaatgtatcaggcaa

SEQ ID NO: 383 - DNA, 20 bp, synthetic construct
  source 1..20: mol_type = other DNA
tagaggtgaaggccaggcac

SEQ ID NO: 384 - DNA, 20 bp, synthetic construct
  source 1..20: mol_type = other DNA
gtactcttcctcagtcatcc

SEQ ID NO: 385 - DNA, 20 bp, synthetic construct
  source 1..20: mol_type = other DNA
tgtcagtttctccctgaaca

SEQ ID NO: 386 - DNA, 20 bp, synthetic construct
  source 1..20: mol_type = other DNA
tagaatggcacatctcttgg

SEQ ID NO: 387 - DNA, 20 bp, synthetic construct
  source 1..20: mol_type = other DNA
gttttcttcctccacagtct

SEQ ID NO: 388 - DNA, 20 bp, synthetic construct
  source 1..20: mol_type = other DNA
ctggtgtcaacaagccaaag

SEQ ID NO: 389 - DNA, 20 bp, synthetic construct
  source 1..20: mol_type = other DNA
ctgagtctgttttccattct

SEQ ID NO: 390 - DNA, 20 bp, synthetic construct
  source 1..20: mol_type = other DNA
ctgagtctgttttccattct

SEQ ID NO: 391 - RNA, 21 nt, synthetic construct
  source 1..21: mol_type = other RNA
  modified_base 20..21: mod_base = OTHER; note = Thymine
cacaaggaaagctagaagatt

SEQ ID NO: 392 - DNA, 895 bp, Homo sapiens
  source 1..895: mol_type = genomic DNA
gcgtcgtagtctcctgcagcgtctggggtttccgttgcagtcctcggaaccaggacctcggcgtggcctagcgagttatggcgacgaaggccgtgtgcgtgctgaagggcgacggcccagtgcagggcatcatcaatttcgagcagaaggaaagtaatggaccagtgaaggtgtggggaagcattaaaggactgactgaaggcctgcatggattccatgttcatgagtttggagataatacagcaggctgtaccagtgcaggtcctcactttaatcctctatccagaaaacacggtgggccaaaggatgaagagaggcatgttggagacttgggcaatgtgactgctgacaaagatggtgtggccgatgtgtctattgaagattctgtgatctcactctcaggagaccattgcatcattggccgcacactggtggtccatgaaaaagcagatgacttgggcaaaggtggaaatgaagaaagtacaaagacaggaaacgctggaagtcgtttggcttgtggtgtaattgggatcgcccaataaacattcccttggatgtagtctgaggccccttaactcatctgttatcctgctagctgtagaaatgtatcctgataaacattaaacactgtaatcttaaaagtgtaattgtgtgactttttcagagttgctttaaagtacctgtagtgagaaactgatttatgatcacttggaagatttgtatagttttataaaactcagttaaaatgtctgtttcaatgacctgtattttgccagacttaaatcacagatgggtattaaacttgtcagaatttctttgtcattcaagcctgtgaataaaaaccctgtatggcacttattatgaggctattaaaagaatccaaattcaaactaaa

SEQ ID NO: 393 - DNA, 3338 bp, Homo sapiens
  source 1..3338: mol_type = genomic DNA
acgtaacctacggtgtcccgctaggaaagagaggtgcgtcaaacagcgacaagttccgcccacgtaaaagatgacgcttggtgtgtcagccgtccctgctgcccggttgcttctcttttgggggcggggtctagcaagagcaggtgtgggtttaggagatatctccggagcatttggataatgtgacagttggaatgcagtgatgtcgactctttgcccaccgccatctccagctgttgccaagacagagattgctttaagtggcaaatcacctttattagcagctacttttgcttactgggacaatattcttggtcctagagtaaggcacatttgggctccaaagacagaacaggtacttctcagtgatggagaaataacttttcttgccaaccacactctaaatggagaaatccttcgaaatgcagagagtggtgctatagatgtaaagttttttgtcttgtctgaaaagggagtgattattgtttcattaatctttgatggaaactggaatggggatcgcagcacatatggactatcaattatacttccacagacagaacttagtttctacctcccacttcatagagtgtgtgttgatagattaacacatataatccggaaaggaagaatatggatgcataaggaaagacaagaaaatgtccagaagattatcttagaaggcacagagagaatggaagatcagggtcagagtattattccaatgcttactggagaagtgattcctgtaatggaactgctttcatctatgaaatcacacagtgttcctgaagaaatagatatagctgatacagtactcaatgatgatgatattggtgacagctgtcatgaaggctttcttctcaatgccatcagctcacacttgcaaacctgtggctgttccgttgtagtaggtagcagtgcagagaaagtaaataagatagtcagaacattatgcctttttctgactccagcagagagaaaatgctccaggttatgtgaagcagaatcatcatttaaatatgagtcagggctctttgtacaaggcctgctaaaggattcaactggaagctttgtgctgcctttccggcaagtcatgtatgctccatatcccaccacacacatagatgtggatgtcaatactgtgaagcagatgccaccctgtcatgaacatatttataatcagcgtagatacatgagatccgagctgacagccttctggagagccacttcagaagaagacatggctcaggatacgatcatctacactgacgaaagctttactcctgatttgaatatttttcaagatgtcttacacagagacactctagtgaaagccttcctggatcaggtctttcagctgaaacctggcttatctctcagaagtactttccttgcacagtttctacttgtccttcacagaaaagccttgacactaataaaatatatagaagacgatacgcagaagggaaaaaagccctttaaatctcttcggaacctgaagatagaccttgatttaacagcagagggcgatcttaacataataatggctctggctgagaaaattaaaccaggcctacactcttttatctttggaagacctttctacactagtgtgcaagaacgagatgttctaatgactttttaaatgtgtaacttaataagcctattccatcacaatcatgatcgctggtaaagtagctcagtggtgtggggaaacgttcccctggatcatactccagaattctgctctcagcaattgcagttaagtaagttacactacagttctcacaagagcctgtgaggggatgtcaggtgcatcattacattgggtgtctcttttcctagatttatgcttttgggatacagacctatgtttacaatataataaatattattgctatcttttaaagatataataataggatgtaaacttgaccacaactactgtttttttgaaatacatgattcatggtttacatgtgtcaaggtgaaatctgagttggcttttacagatagttgactttctatcttttggcattctttggtgtgtagaattactgtaatacttctgcaatcaactgaaaactagagcctttaaatgatttcaattccacagaaagaaagtgagcttgaacataggatgagctttagaaagaaaattgatcaagcagatgtttaattggaattgattattagatcctactttgtggatttagtccctgggattcagtctgtagaaatgtctaatagttctctatagtccttgttcctggtgaaccacagttagggtgttttgtttattttattgttcttgctattgttgatattctatgtagttgagctctgtaaaaggaaattgtattttatgttttagtaattgttgccaactttttaaattaattttcattatttttgagccaaattgaaatgtgcacctcctgtgccttttttctccttagaaaatctaattacttggaacaagttcagatttcactggtcagtcattttcatcttgttttcttcttgctaagtcttaccatgtacctgctttggcaatcattgcaactctgagattataaaatgccttagagaatatactaactaataagatctttttttcagaaacagaaaatagttccttgagtacttccttcttgcatttctgcctatgtttttgaagttgttgctgtttgcctgcaataggctataaggaatagcaggagaaattttactgaagtgctgttttcctaggtgctactttggcagagctaagttatcttttgttttcttaatgcgtttggaccattttgctggctataaaataactgattaatataattctaacacaatgttgacattgtagttacacaaacacaaataaatattttatttaaaattctggaagtaatataaaagggaaaatatatttataagaaagggataaaggtaatagagcccttctgccccccacccaccaaatttacacaacaaaatgacatgttcgaatgtgaaaggtcataatagctttcccatcatgaatcagaaagatgtggacagcttgatgttttagacaaccactgaactagatgactgttgtactgtagctcagtcatttaaaaaatatataaatactaccttgtagtgtcccatactgtgttttttacatggtagattcttatttaagtgctaactggttattttctttggctggtttattgtactgttatacagaatgtaagttgtacagtgaaataagttattaaagcatgtgtaaacattgttatatatcttttctcctaaatggagaattttgaataaaatatatttgaaatttt

SEQ ID NO: 394 - DNA, 3231 bp, Homo sapiens
  source 1..3231: mol_type = genomic DNA
ggttgcggtgcctgcgcccgcggcggcggaggcgcaggcggtggcgagtggatatctccggagcatttggataatgtgacagttggaatgcagtgatgtcgactctttgcccaccgccatctccagctgttgccaagacagagattgctttaagtggcaaatcacctttattagcagctacttttgcttactgggacaatattcttggtcctagagtaaggcacatttgggctccaaagacagaacaggtacttctcagtgatggagaaataacttttcttgccaaccacactctaaatggagaaatccttcgaaatgcagagagtggtgctatagatgtaaagttttttgtcttgtctgaaaagggagtgattattgtttcattaatctttgatggaaactggaatggggatcgcagcacatatggactatcaattatacttccacagacagaacttagtttctacctcccacttcatagagtgtgtgttgatagattaacacatataatccggaaaggaagaatatggatgcataaggaaagacaagaaaatgtccagaagattatcttagaaggcacagagagaatggaagatcagggtcagagtattattccaatgcttactggagaagtgattcctgtaatggaactgctttcatctatgaaatcacacagtgttcctgaagaaatagatatagctgatacagtactcaatgatgatgatattggtgacagctgtcatgaaggctttcttctcaatgccatcagctcacacttgcaaacctgtggctgttccgttgtagtaggtagcagtgcagagaaagtaaataagatagtcagaacattatgcctttttctgactccagcagagagaaaatgctccaggttatgtgaagcagaatcatcatttaaatatgagtcagggctctttgtacaaggcctgctaaaggattcaactggaagctttgtgctgcctttccggcaagtcatgtatgctccatatcccaccacacacatagatgtggatgtcaatactgtgaagcagatgccaccctgtcatgaacatatttataatcagcgtagatacatgagatccgagctgacagccttctggagagccacttcagaagaagacatggctcaggatacgatcatctacactgacgaaagctttactcctgatttgaatatttttcaagatgtcttacacagagacactctagtgaaagccttcctggatcaggtctttcagctgaaacctggcttatctctcagaagtactttccttgcacagtttctacttgtccttcacagaaaagccttgacactaataaaatatatagaagacgatacgcagaagggaaaaaagccctttaaatctcttcggaacctgaagatagaccttgatttaacagcagagggcgatcttaacataataatggctctggctgagaaaattaaaccaggcctacactcttttatctttggaagacctttctacactagtgtgcaagaacgagatgttctaatgactttttaaatgtgtaacttaataagcctattccatcacaatcatgatcgctggtaaagtagctcagtggtgtggggaaacgttcccctggatcatactccagaattctgctctcagcaattgcagttaagtaagttacactacagttctcacaagagcctgtgaggggatgtcaggtgcatcattacattgggtgtctcttttcctagatttatgcttttgggatacagacctatgtttacaatataataaatattattgctatcttttaaagatataataataggatgtaaacttgaccacaactactgtttttttgaaatacatgattcatggtttacatgtgtcaaggtgaaatctgagttggcttttacagatagttgactttctatcttttggcattctttggtgtgtagaattactgtaatacttctgcaatcaactgaaaactagagcctttaaatgatttcaattccacagaaagaaagtgagcttgaacataggatgagctttagaaagaaaattgatcaagcagatgtttaattggaattgattattagatcctactttgtggatttagtccctgggattcagtctgtagaaatgtctaatagttctctatagtccttgttcctggtgaaccacagttagggtgttttgtttattttattgttcttgctattgttgatattctatgtagttgagctctgtaaaaggaaattgtattttatgttttagtaattgttgccaactttttaaattaattttcattatttttgagccaaattgaaatgtgcacctcctgtgccttttttctccttagaaaatctaattacttggaacaagttcagatttcactggtcagtcattttcatcttgttttcttcttgctaagtcttaccatgtacctgctttggcaatcattgcaactctgagattataaaatgccttagagaatatactaactaataagatctttttttcagaaacagaaaatagttccttgagtacttccttcttgcatttctgcctatgtttttgaagttgttgctgtttgcctgcaataggctataaggaatagcaggagaaattttactgaagtgctgttttcctaggtgctactttggcagagctaagttatcttttgttttcttaatgcgtttggaccattttgctggctataaaataactgattaatataattctaacacaatgttgacattgtagttacacaaacacaaataaatattttatttaaaattctggaagtaatataaaagggaaaatatatttataagaaagggataaaggtaatagagcccttctgccccccacccaccaaatttacacaacaaaatgacatgttcgaatgtgaaaggtcataatagctttcccatcatgaatcagaaagatgtggacagcttgatgttttagacaaccactgaactagatgactgttgtactgtagctcagtcatttaaaaaatatataaatactaccttgtagtgtcccatactgtgttttttacatggtagattcttatttaagtgctaactggttattttctttggctggtttattgtactgttatacagaatgtaagttgtacagtgaaataagttattaaagcatgtgtaaacattgttatatatcttttctcctaaatggagaattttgaataaaatatatttgaaatttt

SEQ ID NO: 395 - DNA, 1950 bp, Homo sapiens
  source 1..1950: mol_type = genomic DNA
acgtaacctacggtgtcccgctaggaaagagaggtgcgtcaaacagcgacaagttccgcccacgtaaaagatgacgcttgatatctccggagcatttggataatgtgacagttggaatgcagtgatgtcgactctttgcccaccgccatctccagctgttgccaagacagagattgctttaagtggcaaatcacctttattagcagctacttttgcttactgggacaatattcttggtcctagagtaaggcacatttgggctccaaagacagaacaggtacttctcagtgatggagaaataacttttcttgccaaccacactctaaatggagaaatccttcgaaatgcagagagtggtgctatagatgtaaagttttttgtcttgtctgaaaagggagtgattattgtttcattaatctttgatggaaactggaatggggatcgcagcacatatggactatcaattatacttccacagacagaacttagtttctacctcccacttcatagagtgtgtgttgatagattaacacatataatccggaaaggaagaatatggatgcataaggaaagacaagaaaatgtccagaagattatcttagaaggcacagagagaatggaagatcagggtcagagtattattccaatgcttactggagaagtgattcctgtaatggaactgctttcatctatgaaatcacacagtgttcctgaagaaatagatatagctgatacagtactcaatgatgatgatattggtgacagctgtcatgaaggctttcttctcaagtaagaatttttcttttcataaaagctggatgaagcagataccatcttatgctcacctatgacaagatttggaagaaagaaaataacagactgtctacttagattgttctagggacattacgtatttgaactgttgcttaaatttgtgttatttttcactcattatatttctatatatatttggtgttattccatttgctatttaaagaaaccgagtttccatcccagacaagaaatcatggccccttgcttgattctggtttcttgttttacttctcattaaagctaacagaatcctttcatattaagttgtactgtagatgaacttaagttatttaggcgtagaacaaaattattcatatttatactgatctttttccatccagcagtggagtttagtacttaagagtttgtgcccttaaaccagactccctggattaatgctgtgtacccgtgggcaaggtgcctgaattctctatacacctatttcctcatctgtaaaatggcaataatagtaatagtacctaatgtgtagggttgttataagcattgagtaagataaataatataaagcacttagaacagtgcctggaacataaaaacacttaataatagctcatagctaacatttcctatttacatttcttctagaaatagccagtatttgttgagtgcctacatgttagttcctttactagttgctttacatgtattatcttatattctgttttaaagtttcttcacagttacagattttcatgaaattttacttttaataaaagagaagtaaaagtataaagtattcacttttatgttcacagtcttttcctttaggctcatgatggagtatcagaggcatgagtgtgtttaacctaagagccttaatggcttgaatcagaagcactttagtcctgtatctgttcagtgtcagcctttcatacatcattttaaatcccatttgactttaagtaagtcacttaatctctctacatgtcaatttcttcagctataaaatgatggtatttcaataaataaatacattaattaaatgatattatactgactaattgggctgttttaaggctcaataagaaaatttctgtgaaaggtctctagaaaatgtaggttcctatacaaataaaagataacattgtgcttata

SEQ ID NO: 396 - DNA, 3993 bp, Homo sapiens
  source 1..3993: mol_type = genomic DNA
cccgagaaagcaacccagcgcgccgcccgctcctcacgtgtccctcccggccccggggccacctcacgttctgcttccgtctgacccctccgacttccgaggtcgaaacagtaacaaaggactgcctcagtctacgatttcttttgatggaatctatgcaaatatgaggatggttcatatacttacatcagttgttggctccaaatgtgaagtacaagtgaaaaatggaggtatatatgaaggagtttttaaaacttacagtccgaagtgtgatttggtacttgatgccgcacatgagaaaagtacagaatccagttcggggccgaaacgtgaagaaataatggagagtattttgttcaaatgttcagactttgttgtggtacagtttaaagatatggactccagttatgcaaaaagagatgcttttactgactctgctatcagtgctaaagtgaatggcgaacacaaagagaaggacctggagccctgggatgcaggtgaactcacagccaatgaggaacttgaggctttggaaaatgacgtatctaatggatgggatcccaatgatatgtttcgatataatgaagaaaattatggtgtagtgtctacgtatgatagcagtttatcttcgtatacagtgcccttagaaagagataactcagaagaatttttaaaacgggaagcaagggcaaaccagttagcagaagaaattgagtcaagtgcccagtacaaagctcgagtggccctggaaaatgatgataggagtgaggaagaaaaatacacagcagttcagagaaattccagtgaacgtgaggggcacagcataaacactagggaaaataaatatattcctcctggacaaagaaatagagaagtcatatcctggggaagtgggagacagaattcaccgcgtatgggccagcctggatcgggctccatgccatcaagatccacttctcacacttcagatttcaacccgaattctggttcagaccaaagagtagttaatggaggtgttccctggccatcgccttgcccatctccttcctctcgcccaccttctcgctaccagtcaggtcccaactctcttccacctcgggcagccacccctacacggccgccctccaggcccccctcgcggccatccagacccccgtctcacccctctgctcatggttctccagctcctgtctctactatgcctaaacgcatgtcttcagaagggcctccaaggatgtccccaaaggcccagcgacatcctcgaaatcacagagtttctgctgggaggggttccatatccagtggcctagaatttgtatcccacaacccacccagtgaagcagctactcctccagtagcaaggaccagtccctcggggggaacgtggtcatcagtggtcagtggggttccaagattatcccctaaaactcatagacccaggtctcccagacagaacagtattggaaatacccccagtgggccagttcttgcttctccccaagctggtattattccaactgaagctgttgccatgcctattccagctgcatctcctacgcctgctagtcctgcatcgaacagagctgttaccccttctagtgaggctaaagattccaggcttcaagatcagaggcagaactctcctgcagggaataaagaaaatattaaacccaatgaaacatcacctagcttctcaaaagctgaaaacaaaggtatatcaccagttgtttctgaacatagaaaacagattgatgatttaaagaaatttaagaatgattttaggttacagccaagttctacttctgaatctatggatcaactactaaacaaaaatagagagggagaaaaatcaagagatttgatcaaagacaaaattgaaccaagtgctaaggattctttcattgaaaatagcagcagcaactgtaccagtggcagcagcaagccgaatagccccagcatttccccttcaatacttagtaacacggagcacaagaggggacctgaggtcacttcccaaggggttcagacttccagcccagcatgtaaacaagagaaagacgataaggaagagaagaaagacgcagctgagcaagttaggaaatcaacattgaatcccaatgcaaaggagttcaacccacgttccttctctcagccaaagccttctactaccccaacttcacctcggcctcaagcacaacctagcccatctatggtgggtcatcaacagccaactccagtttatactcagcctgtttgttttgcaccaaatatgatgtatccagtcccagtgagcccaggcgtgcaacctttatacccaatacctatgacgcccatgccagtgaatcaagccaagacatatagagcagtaccaaatatgccccaacagcggcaagaccagcatcatcagagtgccatgatgcacccagcgtcagcagcgggcccaccgattgcagccaccccaccagcttactccacgcaatatgttgcctacagtcctcagcagttcccaaatcagccccttgttcagcatgtgccacattatcagtctcagcatcctcatgtctatagtcctgtaatacagggtaatgctagaatgatggcaccaccaacacacgcccagcctggtttagtatcttcttcagcaactcagtacggggctcatgagcagacgcatgcgatgtatgcatgtcccaaattaccatacaacaaggagacaagcccttctttctactttgccatttccacgggctcccttgctcagcagtatgcgcaccctaacgctaccctgcacccacatactccacaccctcagccttcagctacccccactggacagcagcaaagccaacatggtggaagtcatcctgcacccagtcctgttcagcaccatcagcaccaggccgcccaggctctccatctggccagtccacagcagcagtcagccatttaccacgcggggcttgcgccaactccaccctccatgacacctgcctccaacacgcagtcgccacagaatagtttcccagcagcacaacagactgtctttacgatccatccttctcacgttcagccggcgtataccaacccaccccacatggcccacgtacctcagtgcgccagtgaggctctggcaaggtgtgggctagagatgcgactcagttggatctatctctcagaaggctaccttgctcatgtacagtcaggaatggttccttctcatccaactgcccatgcgccaatgatgctaatgacgacacagccacccggcggtccccaggccgccctcgctcaaagtgcactacagcccattccagtctcgacaacagcgcatttcccctatatgacgcacccttcagtacaagcccaccaccaacagcagttgtaaggctgccctggaggaaccgaaaggccaaattccctcctcccttctactgcttctaccaactggaagcacagaaaactagaatttcatttattttgtttttaaaatatatatgttgatttcttgtaacatccaataggaatgctaacagttcacttgcagtggaagatacttggaccgagtagaggcatttaggaacttgggggctattccataattccatatgctgtttcagagtcccgcaggtaccccagctctgcttgccgaaactggaagttatttattttttaataacccttgaaagtcatgaacacatcagctagcaaaagaagtaacaagagtgattcttgctgctattactgctaaaaaaaaaaaaaaaaaaaaatcaagacttggaacgcccttttactaaacttgacaaagtttcagtaaattcttaccgtcaaactgacggattattatttataaatcaagtttgatgaggtgatcactgtctacagtggttcaacttttaagttaagggaaaaacttttactttgtagataatataaaataaaaacttaaaaaaaatttaaaaaataaaaaaagttttaaaaactgaaaaaaaaaaa

SEQ ID NO: 397 - DNA, 3755 bp, Homo sapiens
  source 1..3755: mol_type = genomic DNA
cccgagaaagcaacccagcgcgccgcccgctcctcacgtgtccctcccggccccggggccacctcacgttctgcttccgtctgacccctccgacttccgatttcttttgatggaatctatgcaaatatgaggatggttcatatacttacatcagttgtttgtgatttggtacttgatgccgcacatgagaaaagtacagaatccagttcggggccgaaacgtgaagaaataatggagagtattttgttcaaatgttcagactttgttgtggtacagtttaaagatatggactccagttatgcaaaaagagatgcttttactgactctgctatcagtgctaaagtgaatggcgaacacaaagagaaggacctggagccctgggatgcaggtgaactcacagccaatgaggaacttgaggctttggaaaatgacgtatctaatggatgggatcccaatgatatgtttcgatataatgaagaaaattatggtgtagtgtctacgtatgatagcagtttatcttcgtatacagtgcccttagaaagagataactcagaagaatttttaaaacgggaagcaagggcaaaccagttagcagaagaaattgagtcaagtgcccagtacaaagctcgagtggccctggaaaatgatgataggagtgaggaagaaaaatacacagcagttcagagaaattccagtgaacgtgaggggcacagcataaacactagggaaaataaatatattcctcctggacaaagaaatagagaagtcatatcctggggaagtgggagacagaattcaccgcgtatgggccagcctggatcgggctccatgccatcaagatccacttctcacacttcagatttcaacccgaattctggttcagaccaaagagtagttaatggaggtgttccctggccatcgccttgcccatctccttcctctcgcccaccttctcgctaccagtcaggtcccaactctcttccacctcgggcagccacccctacacggccgccctccaggcccccctcgcggccatccagacccccgtctcacccctctgctcatggttctccagctcctgtctctactatgcctaaacgcatgtcttcagaagggcctccaaggatgtccccaaaggcccagcgacatcctcgaaatcacagagtttctgctgggaggggttccatatccagtggcctagaatttgtatcccacaacccacccagtgaagcagctactcctccagtagcaaggaccagtccctcggggggaacgtggtcatcagtggtcagtggggttccaagattatcccctaaaactcatagacccaggtctcccagacagaacagtattggaaatacccccagtgggccagttcttgcttctccccaagctggtattattccaactgaagctgttgccatgcctattccagctgcatctcctacgcctgctagtcctgcatcgaacagagctgttaccccttctagtgaggctaaagattccaggcttcaagatcagaggcagaactctcctgcagggaataaagaaaatattaaacccaatgaaacatcacctagcttctcaaaagctgaaaacaaaggtatatcaccagttgtttctgaacatagaaaacagattgatgatttaaagaaatttaagaatgattttaggttacagccaagttctacttctgaatctatggatcaactactaaacaaaaatagagagggagaaaaatcaagagatttgatcaaagacaaaattgaaccaagtgctaaggattctttcattgaaaatagcagcagcaactgtaccagtggcagcagcaagccgaatagccccagcatttccccttcaatacttagtaacacggagcacaagaggggacctgaggtcacttcccaaggggttcagacttccagcccagcatgtaaacaagagaaagacgataaggaagagaagaaagacgcagctgagcaagttaggaaatcaacattgaatcccaatgcaaaggagttcaacccacgttccttctctcagccaaagccttctactaccccaacttcacctcggcctcaagcacaacctagcccatctatggtgggtcatcaacagccaactccagtttatactcagcctgtttgttttgcaccaaatatgatgtatccagtcccagtgagcccaggcgtgcaacctttatacccaatacctatgacgcccatgccagtgaatcaagccaagacatatagagcagtaccaaatatgccccaacagcggcaagaccagcatcatcagagtgccatgatgcacccagcgtcagcagcgggcccaccgattgcagccaccccaccagcttactccacgcaatatgttgcctacagtcctcagcagttcccaaatcagccccttgttcagcatgtgccacattatcagtctcagcatcctcatgtctatagtcctgtaatacagggtaatgctagaatgatggcaccaccaacacacgcccagcctggtttagtatcttcttcagcaactcagtacggggctcatgagcagacgcatgcgatgtatgtttccacgggctcccttgctcagcagtatgcgcaccctaacgctaccctgcacccacatactccacaccctcagccttcagctacccccactggacagcagcaaagccaacatggtggaagtcatcctgcacccagtcctgttcagcaccatcagcaccaggccgcccaggctctccatctggccagtccacagcagcagtcagccatttaccacgcggggcttgcgccaactccaccctccatgacacctgcctccaacacgcagtcgccacagaatagtttcccagcagcacaacagactgtctttacgatccatccttctcacgttcagccggcgtataccaacccaccccacatggcccacgtacctcaggctcatgtacagtcaggaatggttccttctcatccaactgcccatgcgccaatgatgctaatgacgacacagccacccggcggtccccaggccgccctcgctcaaagtgcactacagcccattccagtctcgacaacagcgcatttcccctatatgacgcacccttcagtacaagcccaccaccaacagcagttgtaaggctgccctggaggaaccgaaaggccaaattccctcctcccttctactgcttctaccaactggaagcacagaaaactagaatttcatttattttgtttttaaaatatatatgttgatttcttgtaacatccaataggaatgctaacagttcacttgcagtggaagatacttggaccgagtagaggcatttaggaacttgggggctattccataattccatatgctgtttcagagtcccgcaggtaccccagctctgcttgccgaaactggaagttatttattttttaataacccttgaaagtcatgaacacatcagctagcaaaagaagtaacaagagtgattcttgctgctattactgctaaaaaaaaaaaaaaaaaaaaatcaagacttggaacgcccttttactaaacttgacaaagtttcagtaaattcttaccgtcaaactgacggattattatttataaatcaagtttgatgaggtgatcactgtctacagtggttcaacttttaagttaagggaaaaacttttactttgtagataatataaaataaaaacttaaaaaaaatttaaaaaataaaaaaagttttaaaaactgaaaaaaaaaaa

SEQ ID NO: 398 - DNA, 4347 bp, Homo sapiens
  source 1..4347: mol_type = genomic DNA
agagctcgcctccctccgcctcagactgttttggtagcaacggcaacggcggcggcgcgtttcggcccggctcccggcggctccttggtctcggcgggcctccccgccccttcgtcgtcctccttctccccctcgccagcccgggcgcccctccggccgcgccaacccgcgcctccccgctcggcgcccgcgcgtccccgccgcgttccggcgtctccttggcgcgcccggctcccggctgtccccgcccggcgtgcgagccggtgtatgggcccctcaccatgtcgctgaagccccagcagcagcagcagcagcagcagcagcagcagcagcagcaacagcagcagcagcagcagcagcagcagccgccgcccgcggctgccaatgtccgcaagcccggcggcagcggccttctagcgtcgcccgccgccgcgccttcgccgtcctcgtcctcggtctcctcgtcctcggccacggctccctcctcggtggtcgcggcgacctccggcggcgggaggcccggcctgggcagaggtcgaaacagtaacaaaggactgcctcagtctacgatttcttttgatggaatctatgcaaatatgaggatggttcatatacttacatcagttgttggctccaaatgtgaagtacaagtgaaaaatggaggtatatatgaaggagtttttaaaacttacagtccgaagtgtgatttggtacttgatgccgcacatgagaaaagtacagaatccagttcggggccgaaacgtgaagaaataatggagagtattttgttcaaatgttcagactttgttgtggtacagtttaaagatatggactccagttatgcaaaaagagatgcttttactgactctgctatcagtgctaaagtgaatggcgaacacaaagagaaggacctggagccctgggatgcaggtgaactcacagccaatgaggaacttgaggctttggaaaatgacgtatctaatggatgggatcccaatgatatgtttcgatataatgaagaaaattatggtgtagtgtctacgtatgatagcagtttatcttcgtatacagtgcccttagaaagagataactcagaagaatttttaaaacgggaagcaagggcaaaccagttagcagaagaaattgagtcaagtgcccagtacaaagctcgagtggccctggaaaatgatgataggagtgaggaagaaaaatacacagcagttcagagaaattccagtgaacgtgaggggcacagcataaacactagggaaaataaatatattcctcctggacaaagaaatagagaagtcatatcctggggaagtgggagacagaattcaccgcgtatgggccagcctggatcgggctccatgccatcaagatccacttctcacacttcagatttcaacccgaattctggttcagaccaaagagtagttaatggaggtgttccctggccatcgccttgcccatctccttcctctcgcccaccttctcgctaccagtcaggtcccaactctcttccacctcgggcagccacccctacacggccgccctccaggcccccctcgcggccatccagacccccgtctcacccctctgctcatggttctccagctcctgtctctactatgcctaaacgcatgtcttcagaagggcctccaaggatgtccccaaaggcccagcgacatcctcgaaatcacagagtttctgctgggaggggttccatatccagtggcctagaatttgtatcccacaacccacccagtgaagcagctactcctccagtagcaaggaccagtccctcggggggaacgtggtcatcagtggtcagtggggttccaagattatcccctaaaactcatagacccaggtctcccagacagaacagtattggaaatacccccagtgggccagttcttgcttctccccaagctggtattattccaactgaagctgttgccatgcctattccagctgcatctcctacgcctgctagtcctgcatcgaacagagctgttaccccttctagtgaggctaaagattccaggcttcaagatcagaggcagaactctcctgcagggaataaagaaaatattaaacccaatgaaacatcacctagcttctcaaaagctgaaaacaaaggtatatcaccagttgtttctgaacatagaaaacagattgatgatttaaagaaatttaagaatgattttaggttacagccaagttctacttctgaatctatggatcaactactaaacaaaaatagagagggagaaaaatcaagagatttgatcaaagacaaaattgaaccaagtgctaaggattctttcattgaaaatagcagcagcaactgtaccagtggcagcagcaagccgaatagccccagcatttccccttcaatacttagtaacacggagcacaagaggggacctgaggtcacttcccaaggggttcagacttccagcccagcatgtaaacaagagaaagacgataaggaagagaagaaagacgcagctgagcaagttaggaaatcaacattgaatcccaatgcaaaggagttcaacccacgttccttctctcagccaaagccttctactaccccaacttcacctcggcctcaagcacaacctagcccatctatggtgggtcatcaacagccaactccagtttatactcagcctgtttgttttgcaccaaatatgatgtatccagtcccagtgagcccaggcgtgcaacctttatacccaatacctatgacgcccatgccagtgaatcaagccaagacatatagagcaggtaaagtaccaaatatgccccaacagcggcaagaccagcatcatcagagtgccatgatgcacccagcgtcagcagcgggcccaccgattgcagccaccccaccagcttactccacgcaatatgttgcctacagtcctcagcagttcccaaatcagccccttgttcagcatgtgccacattatcagtctcagcatcctcatgtctatagtcctgtaatacagggtaatgctagaatgatggcaccaccaacacacgcccagcctggtttagtatcttcttcagcaactcagtacggggctcatgagcagacgcatgcgatgtatgcatgtcccaaattaccatacaacaaggagacaagcccttctttctactttgccatttccacgggctcccttgctcagcagtatgcgcaccctaacgctaccctgcacccacatactccacaccctcagccttcagctacccccactggacagcagcaaagccaacatggtggaagtcatcctgcacccagtcctgttcagcaccatcagcaccaggccgcccaggctctccatctggccagtccacagcagcagtcagccatttaccacgcggggcttgcgccaactccaccctccatgacacctgcctccaacacgcagtcgccacagaatagtttcccagcagcacaacagactgtctttacgatccatccttctcacgttcagccggcgtataccaacccaccccacatggcccacgtacctcaggctcatgtacagtcaggaatggttccttctcatccaactgcccatgcgccaatgatgctaatgacgacacagccacccggcggtccccaggccgccctcgctcaaagtgcactacagcccattccagtctcgacaacagcgcatttcccctatatgacgcacccttcagtacaagcccaccaccaacagcagttgtaaggctgccctggaggaaccgaaaggccaaattccctcctcccttctactgcttctaccaactggaagcacagaaaactagaatttcatttattttgtttttaaaatatatatgttgatttcttgtaacatccaataggaatgctaacagttcacttgcagtggaagatacttggaccgagtagaggcatttaggaacttgggggctattccataattccatatgctgtttcagagtcccgcaggtaccccagctctgcttgccgaaactggaagttatttattttttaataacccttgaaagtcatgaacacatcagctagcaaaagaagtaacaagagtgattcttgctgctattactgctaaaaaaaaaaaaaaaaaaaaatcaagacttggaacgcccttttactaaacttgacaaagtttcagtaaattcttaccgtcaaactgacggattattatttataaatcaagtttgatgaggtgatcactgtctacagtggttcaacttttaagttaagggaaaaacttttactttgtagataatataaaataaaaacttaaaaaaaatttaaaaaataaaaaaagttttaaaaactga

SEQ ID NO: 399 - DNA, 4341 bp, Homo sapiens
  source 1..4341: mol_type = genomic DNA
agagctcgcctccctccgcctcagactgttttggtagcaacggcaacggcggcggcgcgtttcggcccggctcccggcggctccttggtctcggcgggcctccccgccccttcgtcgtcctccttctccccctcgccagcccgggcgcccctccggccgcgccaacccgcgcctccccgctcggcgcccgcgcgtccccgccgcgttccggcgtctccttggcgcgcccggctcccggctgtccccgcccggcgtgcgagccggtgtatgggcccctcaccatgtcgctgaagccccagcagcagcagcagcagcagcagcagcagcagcagcagcaacagcagcagcagcagcagcagcagcagccgccgcccgcggctgccaatgtccgcaagcccggcggcagcggccttctagcgtcgcccgccgccgcgccttcgccgtcctcgtcctcggtctcctcgtcctcggccacggctccctcctcggtggtcgcggcgacctccggcggcgggaggcccggcctgggcagaggtcgaaacagtaacaaaggactgcctcagtctacgatttcttttgatggaatctatgcaaatatgaggatggttcatatacttacatcagttgttggctccaaatgtgaagtacaagtgaaaaatggaggtatatatgaaggagtttttaaaacttacagtccgaagtgtgatttggtacttgatgccgcacatgagaaaagtacagaatccagttcggggccgaaacgtgaagaaataatggagagtattttgttcaaatgttcagactttgttgtggtacagtttaaagatatggactccagttatgcaaaaagagatgcttttactgactctgctatcagtgctaaagtgaatggcgaacacaaagagaaggacctggagccctgggatgcaggtgaactcacagccaatgaggaacttgaggctttggaaaatgacgtatctaatggatgggatcccaatgatatgtttcgatataatgaagaaaattatggtgtagtgtctacgtatgatagcagtttatcttcgtatacagtgcccttagaaagagataactcagaagaatttttaaaacgggaagcaagggcaaaccagttagcagaagaaattgagtcaagtgcccagtacaaagctcgagtggccctggaaaatgatgataggagtgaggaagaaaaatacacagcagttcagagaaattccagtgaacgtgaggggcacagcataaacactagggaaaataaatatattcctcctggacaaagaaatagagaagtcatatcctggggaagtgggagacagaattcaccgcgtatgggccagcctggatcgggctccatgccatcaagatccacttctcacacttcagatttcaacccgaattctggttcagaccaaagagtagttaatggaggtgttccctggccatcgccttgcccatctccttcctctcgcccaccttctcgctaccagtcaggtcccaactctcttccacctcgggcagccacccctacacggccgccctccaggcccccctcgcggccatccagacccccgtctcacccctctgctcatggttctccagctcctgtctctactatgcctaaacgcatgtcttcagaagggcctccaaggatgtccccaaaggcccagcgacatcctcgaaatcacagagtttctgctgggaggggttccatatccagtggcctagaatttgtatcccacaacccacccagtgaagcagctactcctccagtagcaaggaccagtccctcggggggaacgtggtcatcagtggtcagtggggttccaagattatcccctaaaactcatagacccaggtctcccagacagaacagtattggaaatacccccagtgggccagttcttgcttctccccaagctggtattattccaactgaagctgttgccatgcctattccagctgcatctcctacgcctgctagtcctgcatcgaacagagctgttaccccttctagtgaggctaaagattccaggcttcaagatcagaggcagaactctcctgcagggaataaagaaaatattaaacccaatgaaacatcacctagcttctcaaaagctgaaaacaaaggtatatcaccagttgtttctgaacatagaaaacagattgatgatttaaagaaatttaagaatgattttaggttacagccaagttctacttctgaatctatggatcaactactaaacaaaaatagagagggagaaaaatcaagagatttgatcaaagacaaaattgaaccaagtgctaaggattctttcattgaaaatagcagcagcaactgtaccagtggcagcagcaagccgaatagccccagcatttccccttcaatacttagtaacacggagcacaagaggggacctgaggtcacttcccaaggggttcagacttccagcccagcatgtaaacaagagaaagacgataaggaagagaagaaagacgcagctgagcaagttaggaaatcaacattgaatcccaatgcaaaggagttcaacccacgttccttctctcagccaaagccttctactaccccaacttcacctcggcctcaagcacaacctagcccatctatggtgggtcatcaacagccaactccagtttatactcagcctgtttgttttgcaccaaatatgatgtatccagtcccagtgagcccaggcgtgcaacctttatacccaatacctatgacgcccatgccagtgaatcaagccaagacatatagagcagtaccaaatatgccccaacagcggcaagaccagcatcatcagagtgccatgatgcacccagcgtcagcagcgggcccaccgattgcagccaccccaccagcttactccacgcaatatgttgcctacagtcctcagcagttcccaaatcagccccttgttcagcatgtgccacattatcagtctcagcatcctcatgtctatagtcctgtaatacagggtaatgctagaatgatggcaccaccaacacacgcccagcctggtttagtatcttcttcagcaactcagtacggggctcatgagcagacgcatgcgatgtatgcatgtcccaaattaccatacaacaaggagacaagcccttctttctactttgccatttccacgggctcccttgctcagcagtatgcgcaccctaacgctaccctgcacccacatactccacaccctcagccttcagctacccccactggacagcagcaaagccaacatggtggaagtcatcctgcacccagtcctgttcagcaccatcagcaccaggccgcccaggctctccatctggccagtccacagcagcagtcagccatttaccacgcggggcttgcgccaactccaccctccatgacacctgcctccaacacgcagtcgccacagaatagtttcccagcagcacaacagactgtctttacgatccatccttctcacgttcagccggcgtataccaacccaccccacatggcccacgtacctcaggctcatgtacagtcaggaatggttccttctcatccaactgcccatgcgccaatgatgctaatgacgacacagccacccggcggtccccaggccgccctcgctcaaagtgcactacagcccattccagtctcgacaacagcgcatttcccctatatgacgcacccttcagtacaagcccaccaccaacagcagttgtaaggctgccctggaggaaccgaaaggccaaattccctcctcccttctactgcttctaccaactggaagcacagaaaactagaatttcatttattttgtttttaaaatatatatgttgatttcttgtaacatccaataggaatgctaacagttcacttgcagtggaagatacttggaccgagtagaggcatttaggaacttgggggctattccataattccatatgctgtttcagagtcccgcaggtaccccagctctgcttgccgaaactggaagttatttattttttaataacccttgaaagtcatgaacacatcagctagcaaaagaagtaacaagagtgattcttgctgctattactgctaaaaaaaaaaaaaaaaaaaaatcaagacttggaacgcccttttactaaacttgacaaagtttcagtaaattcttaccgtcaaactgacggattattatttataaatcaagtttgatgaggtgatcactgtctacagtggttcaacttttaagttaagggaaaaacttttactttgtagataatataaaataaaaacttaaaaaaaatttaaaaaataaaaaaagttttaaaaactga

SEQ ID NO: 400 - DNA, 4280 bp, Homo sapiens
  source 1..4280: mol_type = genomic DNA
agagctcgcctccctccgcctcagactgttttggtagcaacggcaacggcggcggcgcgtttcggcccggctcccggcggctccttggtctcggcgggcctccccgccccttcgtcgtcctccttctccccctcgccagcccgggcgcccctccggccgcgccaacccgcgcctccccgctcggcgcccgcgcgtccccgccgcgttccggcgtctccttggcgcgcccggctcccggctgtccccgcccggcgtgcgagccggtgtatgggcccctcaccatgtcgctgaagccccagcagcagcagcagcagcagcagcagcagcagcagcagcaacagcagcagcagcagcagcagcagcagccgccgcccgcggctgccaatgtccgcaagcccggcggcagcggccttctagcgtcgcccgccgccgcgccttcgccgtcctcgtcctcggtctcctcgtcctcggccacggctccctcctcggtggtcgcggcgacctccggcggcgggaggcccggcctgggcagaggtcgaaacagtaacaaaggactgcctcagtctacgatttcttttgatggaatctatgcaaatatgaggatggttcatatacttacatcagttgttggctccaaatgtgaagtacaagtgaaaaatggaggtatatatgaaggagtttttaaaacttacagtccgaagtgtgatttggtacttgatgccgcacatgagaaaagtacagaatccagttcggggccgaaacgtgaagaaataatggagagtattttgttcaaatgttcagactttgttgtggtacagtttaaagatatggactccagttatgcaaaaagagatgcttttactgactctgctatcagtgctaaagtgaatggcgaacacaaagagaaggacctggagccctgggatgcaggtgaactcacagccaatgaggaacttgaggctttggaaaatgacgtatctaatggatgggatcccaatgatatgtttcgatataatgaagaaaattatggtgtagtgtctacgtatgatagcagtttatcttcgtatacagtgcccttagaaagagataactcagaagaatttttaaaacgggaagcaagggcaaaccagttagcagaagaaattgagtcaagtgcccagtacaaagctcgagtggccctggaaaatgatgataggagtgaggaagaaaaatacacagcagttcagagaaattccagtgaacgtgaggggcacagcataaacactagggaaaataaatatattcctcctggacaaagaaatagagaagtcatatcctggggaagtgggagacagaattcaccgcgtatgggccagcctggatcgggctccatgccatcaagatccacttctcacacttcagatttcaacccgaattctggttcagaccaaagagtagttaatggaggtgttccctggccatcgccttgcccatctccttcctctcgcccaccttctcgctaccagtcaggtcccaactctcttccacctcgggcagccacccctacacggccgccctccaggcccccctcgcggccatccagacccccgtctcacccctctgctcatggttctccagctcctgtctctactatgcctaaacgcatgtcttcagaagggcctccaaggatgtccccaaaggcccagcgacatcctcgaaatcacagagtttctgctgggaggggttccatatccagtggcctagaatttgtatcccacaacccacccagtgaagcagctactcctccagtagcaaggaccagtccctcggggggaacgtggtcatcagtggtcagtggggttccaagattatcccctaaaactcatagacccaggtctcccagacagaacagtattggaaatacccccagtgggccagttcttgcttctccccaagctggtattattccaactgaagctgttgccatgcctattccagctgcatctcctacgcctgctagtcctgcatcgaacagagctgttaccccttctagtgaggctaaagattccaggcttcaagatcagaggcagaactctcctgcagggaataaagaaaatattaaacccaatgaaacatcacctagcttctcaaaagctgaaaacaaaggtatatcaccagttgtttctgaacatagaaaacagattgatgatttaaagaaatttaagaatgattttaggttacagccaagttctacttctgaatctatggatcaactactaaacaaaaatagagagggagaaaaatcaagagatttgatcaaagacaaaattgaaccaagtgctaaggattctttcattgaaaatagcagcagcaactgtaccagtggcagcagcaagccgaatagccccagcatttccccttcaatacttagtaacacggagcacaagaggggacctgaggtcacttcccaaggggttcagacttccagcccagcatgtaaacaagagaaagacgataaggaagagaagaaagacgcagctgagcaagttaggaaatcaacattgaatcccaatgcaaaggagttcaacccacgttccttctctcagccaaagccttctactaccccaacttcacctcggcctcaagcacaacctagcccatctatggtgggtcatcaacagccaactccagtttatactcagcctgtttgttttgcaccaaatatgatgtatccagtcccagtgagcccaggcgtgcaataccaaatatgccccaacagcggcaagaccagcatcatcagagtgccatgatgcacccagcgtcagcagcgggcccaccgattgcagccaccccaccagcttactccacgcaatatgttgcctacagtcctcagcagttcccaaatcagccccttgttcagcatgtgccacattatcagtctcagcatcctcatgtctatagtcctgtaatacagggtaatgctagaatgatggcaccaccaacacacgcccagcctggtttagtatcttcttcagcaactcagtacggggctcatgagcagacgcatgcgatgtatgcatgtcccaaattaccatacaacaaggagacaagcccttctttctactttgccatttccacgggctcccttgctcagcagtatgcgcaccctaacgctaccctgcacccacatactccacaccctcagccttcagctacccccactggacagcagcaaagccaacatggtggaagtcatcctgcacccagtcctgttcagcaccatcagcaccaggccgcccaggctctccatctggccagtccacagcagcagtcagccatttaccacgcggggcttgcgccaactccaccctccatgacacctgcctccaacacgcagtcgccacagaatagtttcccagcagcacaacagactgtctttacgatccatccttctcacgttcagccggcgtataccaacccaccccacatggcccacgtacctcaggctcatgtacagtcaggaatggttccttctcatccaactgcccatgcgccaatgatgctaatgacgacacagccacccggcggtccccaggccgccctcgctcaaagtgcactacagcccattccagtctcgacaacagcgcatttcccctatatgacgcacccttcagtacaagcccaccaccaacagcagttgtaaggctgccctggaggaaccgaaaggccaaattccctcctcccttctactgcttctaccaactggaagcacagaaaactagaatttcatttattttgtttttaaaatatatatgttgatttcttgtaacatccaataggaatgctaacagttcacttgcagtggaagatacttggaccgagtagaggcatttaggaacttgggggctattccataattccatatgctgtttcagagtcccgcaggtaccccagctctgcttgccgaaactggaagttatttattttttaataacccttgaaagtcatgaacacatcagctagcaaaagaagtaacaagagtgattcttgctgctattactgctaaaaaaaaaaaaaaaaaaaaatcaagacttggaacgcccttttactaaacttgacaaagtttcagtaaattcttaccgtcaaactgacggattattatttataaatcaagtttgatgaggtgatcactgtctacagtggttcaacttttaagttaagggaaaaacttttactttgtagataatataaaataaaaacttaaaaaaaatttaaaaaataaaaaaagttttaaaaactga

SEQ ID NO: 401 - DNA, 5116 bp, Homo sapiens
  source 1..5116: mol_type = genomic DNA
acttaagcttcgacgcaggaggcggggctgctcagtcctccaggcgtcggtactcagcggtgttggaacttcgttgcttgcttgcctgtgcgcgcgtgcgcggacatggcctcaaacgattatacccaacaagcaacccaaagctatggggcctaccccacccagcccgggcagggctattcccagcagagcagtcagccctacggacagcagagttacagtggttatagccagtccacggacacttcaggctatggccagagcagctattcttcttatggccagagccagaacagctatggaactcagtcaactccccagggatatggctcgactggcggctatggcagtagccagagctcccaatcgtcttacgggcagcagtcctcctaccctggctatggccagcagccagctcccagcagcacctcgggaagttacggtagcagttctcagagcagcagctatgggcagccccagagtgggagctacagccagcagcctagctatggtggacagcagcaaagctatggacagcagcaaagctataatccccctcagggctatggacagcagaaccagtacaacagcagcagtggtggtggaggtggaggtggaggtggaggtaactatggccaagatcaatcctccatgagtagtggtggtggcagtggtggcggttatggcaatcaagaccagagtggtggaggtggcagcggtggctatggacagcaggaccgtggaggccgcggcaggggtggcagtggtggcggcggcggcggcggcggtggtggttacaaccgcagcagtggtggctatgaacccagaggtcgtggaggtggccgtggaggcagaggtggcatgggcggaagtgaccgtggtggcttcaataaatttggtggccctcgggaccaaggatcacgtcatgactccgaacaggataattcagacaacaacaccatctttgtgcaaggcctgggtgagaatgttacaattgagtctgtggctgattacttcaagcagattggtattattaagacaaacaagaaaacgggacagcccatgattaatttgtacacagacagggaaactggcaagctgaagggagaggcaacggtctcttttgatgacccaccttcagctaaagcagctattgactggtttgatggtaaagaattctccggaaatcctatcaaggtctcatttgctactcgccgggcagactttaatcggggtggtggcaatggtcgtggaggccgagggcgaggaggacccatgggccgtggaggctatggaggtggtggcagtggtggtggtggccgaggaggatttcccagtggaggtggtggcggtggaggacagcagcgagctggtgactggaagtgtcctaatcccacctgtgagaatatgaacttctcttggaggaatgaatgcaaccagtgtaaggcccctaaaccagatggcccaggagggggaccaggtggctctcacatggggggtaactacggggatgatcgtcgtggtggcagaggaggctatgatcgaggcggctaccggggccgcggcggggaccgtggaggcttccgagggggccggggtggtggggacagaggtggctttggccctggcaagatggattccaggggtgagcacagacaggatcgcagggagaggccgtattaattagcctggctccccaggttctggaacagctttttgtcctgtacccagtgttaccctcgttattttgtaaccttccaattcctgatcacccaagggtttttttgtgtcggactatgtaattgtaactatacctctggttcccattaaaagtgaccattttagttaaattttgttcctcttcccccttttcactttcctggaagatcgatgtcccgatcaggaaggtagagagttttcctgttcagattaccctgcccagcaggaactggaatacagtgttcggggagaaggccaaatgatatccttgagagcagagattaaacttttctgtcatggggaaagttggtgtataaatgagaaatgaagaacatgggatgtcatgagtgttggcctaaatttgcccagctatggggaatttttcctttaccacatttatttgcatactggtcttagtttatttgcagcagtttatccctttttaagaactctttgatcttttggcccttttaatggtgaggctcaaacaaactacatttaaatggggcagtattcagatttgaccatggtggagagcgcttagccactctgggtctttcacaggaaggagagtaactgagtgctgcaggagtttgtggagtggagtcaggatctaggaggtgagtgactcccttcctagctgccctggtgaacagcgcttgggtagatacctgctataaggagactggtctggctgggttactttcacatcctgcctgtactcagagggcttgaggtcattgacattatgagattttaggcttgatccctttttgattggagggtggaaggccctcctaagggaatgataagtgataagagggggaaggggttgcagccaatgagttaaaaccttagagcagtgctcctcagcctcttaccatgtggttgtaaacttgcacgtacctgccaaccagttatttagcatgctttttattttagttacacagagcgtaacattaacccaagagcagaaaggttttatttacagggttttcgaacttggtttgtaagacagctgccatcacaagcatagcttacaaatgtgctggggacccctaattgggaagtgctttcctctcaaatttttattttttatttttagagacagagtcttgctctgtcatccaggctggagtgcagtggcgtgatctcggctcactgtagcctctgcctcctgagtttaagcgattctcctgcctcaggagaatcccagcttctgagtagctgagactacaggcgtgggccaccatgcccacctagtttttgcatttttagtggaggtgtggtttcactgtgttggccaggctggtctcttaactcctgacctcaggtgatccacctgccttggcctcccaaagtgctggaattacaggcatgagccgctgcatctggccatcctctcaaattttcaagtgttccacaagtatgttctctactgaagagttgctgcatccttgaatcttgggtgatttgaggcacagaaactatgactttattttttgagatggagttttgctcttgttgcccaggctggagtgcaatggcacgtttttcggcttaccgcaactgccgcctcctgggttcaagcgatagctgggattacaggcatgcgccaccatgcccagctaatttatttgtatttttagtagagacggggtttctccatgttggtcaggctggtctcgaactcccgacctcaggtgatgtgcacacctcagcctcccaataaaccatgacttttaagaggaatagcaggtttacttcccctgccagcattggggtgctctctaagcaacagtaggcggagagtggtctggcgtattaaaaacaaaggatcgtcaagtgggccttcccaggcattgctttgacttagtacatgtagaggatgtggcagttctctccgtccctgccactgctggtttctttgttaaatgtttagttgaaatggcctgatacgatatttgagtagttcactgttggtgctttgcctagcaggattctaatcttgctttggttgtggtcccctgatgccctcctgttaggagtggaggaggtcgaagctccttgtaagatatgattactgggaccattagtgtcaagttcctgtgtccttcaaatggcatatgtgattggccttgaccttaaaaggaaatagggtcccaggtgactgtttagtgggtaggtccagtttggggggatcttccaggagaatggatagagacacctagcagcagagagaacattggtgcctctcaagccaacctcccacctcagcctcccaagtagctgggactacaggtgcttcctcgctaccacacctgggtaattttttttttaattacttttttttttttaagaaacagggtttcactgggttgcccaggctggtcttgaactggcctcaagtgacctgcctgcctcagcctcccaaagtgctgggatcacaggtgtgacccactgcgtttggccagaatactctattcttactgaatgattgaaatctgtcttgaagcattaggtgtcccatttttgtgagttggaattgggacaggctaagtaggaagtgaggagggtggggagagctgtgctgtaggtctgtttgtcccttccttgatgtagccttcagttagccctttcagcttttttccccatcttgtgccgggccttcctgggtttcagtacttggatgtagggctgcagttatgtcagtggtgggtagattgaccaggaattaaggtctagggtccagcccatgtgagacttgactcactgatctacctttaggcatgtcttccttccagtctcatcctttttaaattttttttttttttttgagacggtctcactctcacccaggctggattgcagtggtgtgatctcgaccaactgcaacctctgcctcccacccgcaagctatctgcccacctcagcctctggagtagctgggacgggactacaggcacctgccaccatgactggctaatttttttttgtattttttgtggagatggggtcttgccatgttgctcaggctggtctggtctcaaaactgctctgggctcaagtgattgtcccactttggcctcccagagtgctgggattaaggtgtgagatactgtgtccggctatgaaaattttatttttaattaacttgtatatatttatggggtacaatgtcctatttctgtacatgtacacattgtggaatcaaatcaggctaatatatccatcacttcatatcattagcatgaatgagaacatacaaagccactcttagaaaattttgaaatttatgttatttcagcccttttatgctggaggttgcaaatgttttgtgaataatcagaccaaaaataaaaacaaaaaatgattgacttcagtcattcagtaagaa

SEQ ID NO: 402 - DNA, 5107 bp, Homo sapiens
  source 1..5107: mol_type = genomic DNA
acttaagcttcgacgcaggaggcggggctgctcagtcctccaggcgtcggtactcagcggtgttggaacttcgttgcttgcttgcctgtgcgcgcgtgcgcggacatggcctcaaacgattatacccaacaagcaacccaaagctatggggcctaccccacccagcccgggcagggctattcccagcagagcagtcagccctacggacagcagagttacagtggttatagccagtccacggacacttcaggctatggccagagcagctattcttcttatggccagagccagaacacaggctatggaactcagtcaactccccagggatatggctcgactggcggctatggcagtagccagagctcccaatcgtcttacgggcagcagtcctcctaccctggctatggccagcagccagctcccagcagcacctcgggaagttacggtagcagttctcagagcagcagctatgggcagccccagagtgggagctacagccagcagcctagctatggtggacagcagcaaagctatggacagcagcaaagctataatccccctcagggctatggacagcagaaccagtacaacagcagcagtggtggtggaggtggaggtaactatggccaagatcaatcctccatgagtagtggtggtggcagtggtggcggttatggcaatcaagaccagagtggtggaggtggcagcggtggctatggacagcaggaccgtggaggccgcggcaggggtggcagtggtggcggcggcggcggcggcggtggtggttacaaccgcagcagtggtggctatgaacccagaggtcgtggaggtggccgtggaggcagaggtggcatgggcggaagtgaccgtggtggcttcaataaatttggtggccctcgggaccaaggatcacgtcatgactccgaacaggataattcagacaacaacaccatctttgtgcaaggcctgggtgagaatgttacaattgagtctgtggctgattacttcaagcagattggtattattaagacaaacaagaaaacgggacagcccatgattaatttgtacacagacagggaaactggcaagctgaagggagaggcaacggtctcttttgatgacccaccttcagctaaagcagctattgactggtttgatggtaaagaattctccggaaatcctatcaaggtctcatttgctactcgccgggcagactttaatcggggtggtggcaatggtcgtggaggccgagggcgaggaggacccatgggccgtggaggctatggaggtggtggcagtggtggtggtggccgaggaggatttcccagtggaggtggtggcggtggaggacagcagcgagctggtgactggaagtgtcctaatcccacctgtgagaatatgaacttctcttggaggaatgaatgcaaccagtgtaaggcccctaaaccagatggcccaggagggggaccaggtggctctcacatggggggtaactacggggatgatcgtcgtggtggcagaggaggctatgatcgaggcggctaccggggccgcggcggggaccgtggaggcttccgagggggccggggtggtggggacagaggtggctttggccctggcaagatggattccaggggtgagcacagacaggatcgcagggagaggccgtattaattagcctggctccccaggttctggaacagctttttgtcctgtacccagtgttaccctcgttattttgtaaccttccaattcctgatcacccaagggtttttttgtgtcggactatgtaattgtaactatacctctggttcccattaaaagtgaccattttagttaaattttgttcctcttcccccttttcactttcctggaagatcgatgtcccgatcaggaaggtagagagttttcctgttcagattaccctgcccagcaggaactggaatacagtgttcggggagaaggccaaatgatatccttgagagcagagattaaacttttctgtcatggggaaagttggtgtataaatgagaaatgaagaacatgggatgtcatgagtgttggcctaaatttgcccagctatggggaatttttcctttaccacatttatttgcatactggtcttagtttatttgcagcagtttatccctttttaagaactctttgatcttttggcccttttaatggtgaggctcaaacaaactacatttaaatggggcagtattcagatttgaccatggtggagagcgcttagccactctgggtctttcacaggaaggagagtaactgagtgctgcaggagtttgtggagtggagtcaggatctaggaggtgagtgactcccttcctagctgccctggtgaacagcgcttgggtagatacctgctataaggagactggtctggctgggttactttcacatcctgcctgtactcagagggcttgaggtcattgacattatgagattttaggcttgatccctttttgattggagggtggaaggccctcctaagggaatgataagtgataagagggggaaggggttgcagccaatgagttaaaaccttagagcagtgctcctcagcctcttaccatgtggttgtaaacttgcacgtacctgccaaccagttatttagcatgctttttattttagttacacagagcgtaacattaacccaagagcagaaaggttttatttacagggttttcgaacttggtttgtaagacagctgccatcacaagcatagcttacaaatgtgctggggacccctaattgggaagtgctttcctctcaaatttttattttttatttttagagacagagtcttgctctgtcatccaggctggagtgcagtggcgtgatctcggctcactgtagcctctgcctcctgagtttaagcgattctcctgcctcaggagaatcccagcttctgagtagctgagactacaggcgtgggccaccatgcccacctagtttttgcatttttagtggaggtgtggtttcactgtgttggccaggctggtctcttaactcctgacctcaggtgatccacctgccttggcctcccaaagtgctggaattacaggcatgagccgctgcatctggccatcctctcaaattttcaagtgttccacaagtatgttctctactgaagagttgctgcatccttgaatcttgggtgatttgaggcacagaaactatgactttattttttgagatggagttttgctcttgttgcccaggctggagtgcaatggcacgtttttcggcttaccgcaactgccgcctcctgggttcaagcgatagctgggattacaggcatgcgccaccatgcccagctaatttatttgtatttttagtagagacggggtttctccatgttggtcaggctggtctcgaactcccgacctcaggtgatgtgcacacctcagcctcccaataaaccatgacttttaagaggaatagcaggtttacttcccctgccagcattggggtgctctctaagcaacagtaggcggagagtggtctggcgtattaaaaacaaaggatcgtcaagtgggccttcccaggcattgctttgacttagtacatgtagaggatgtggcagttctctccgtccctgccactgctggtttctttgttaaatgtttagttgaaatggcctgatacgatatttgagtagttcactgttggtgctttgcctagcaggattctaatcttgctttggttgtggtcccctgatgccctcctgttaggagtggaggaggtcgaagctccttgtaagatatgattactgggaccattagtgtcaagttcctgtgtccttcaaatggcatatgtgattggccttgaccttaaaaggaaatagggtcccaggtgactgtttagtgggtaggtccagtttggggggatcttccaggagaatggatagagacacctagcagcagagagaacattggtgcctctcaagccaacctcccacctcagcctcccaagtagctgggactacaggtgcttcctcgctaccacacctgggtaattttttttttaattacttttttttttttaagaaacagggtttcactgggttgcccaggctggtcttgaactggcctcaagtgacctgcctgcctcagcctcccaaagtgctgggatcacaggtgtgacccactgcgtttggccagaatactctattcttactgaatgattgaaatctgtcttgaagcattaggtgtcccatttttgtgagttggaattgggacaggctaagtaggaagtgaggagggtggggagagctgtgctgtaggtctgtttgtcccttccttgatgtagccttcagttagccctttcagcttttttccccatcttgtgccgggccttcctgggtttcagtacttggatgtagggctgcagttatgtcagtggtgggtagattgaccaggaattaaggtctagggtccagcccatgtgagacttgactcactgatctacctttaggcatgtcttccttccagtctcatcctttttaaattttttttttttttttgagacggtctcactctcacccaggctggattgcagtggtgtgatctcgaccaactgcaacctctgcctcccacccgcaagctatctgcccacctcagcctctggagtagctgggacgggactacaggcacctgccaccatgactggctaatttttttttgtattttttgtggagatggggtcttgccatgttgctcaggctggtctggtctcaaaactgctctgggctcaagtgattgtcccactttggcctcccagagtgctgggattaaggtgtgagatactgtgtccggctatgaaaattttatttttaattaacttgtatatatttatggggtacaatgtcctatttctgtacatgtacacattgtggaatcaaatcaggctaatatatccatcacttcatatcattagcatgaatgagaacatacaaagccactcttagaaaattttgaaatttatgttatttcagcccttttatgctggaggttgcaaatgttttgtgaataatcagaccaaaaataaaaacaaaaaatgattgacttcagtcattcagtaagaa

SEQ ID NO: 403 - DNA, 1824 bp, Homo sapiens
  source 1..1824: mol_type = genomic DNA
gctcagtcctccaggcgtcggtactcagcggtgttggaacttcgttgcttgcttgcctgtgcgcgcgtgcgcggacatggcctcaaacgattatacccaacaagcaacccaaagctatggggcctaccccacccagcccgggcagggctattcccagcagagcagtcagccctacggacagcagagttacagtggttatagccagtccacggacacttcaggctatggccagagcagctattcttcttatggccagagccagaacacaggctatggaactcagtcaactccccagggatatggctcgactggcggctatggcagtagccagagctcccaatcgtcttacgggcagcagtcctcctaccctggctatggccagcagccagctcccagcagcacctcgggaagttacggtagcagttctcagagcagcagctatgggcagccccagagtgggagctacagccagcagcctagctatggtggacagcagcaaagctatggacagcagcaaagctataatccccctcagggctatggacagcagaaccagtacaacagcagcagtggtggtggaggtggaggtggaggtggaggtaactatggccaagatcaatcctccatgagtagtggtggtggcagtggtggcggttatggcaatcaagaccagagtggtggaggtggcagcggtggctatggacagcaggaccgtggaggccgcggcaggggtggcagtggtggcggcggcggcggcggcggtggtggttacaaccgcagcagtggtggctatgaacccagaggtcgtggaggtggccgtggaggcagaggtggcatgggcggaagtgaccgtggtggcttcaataaatttggtggccctcgggaccaaggatcacgtcatgactccgaacaggataattcagacaacaacaccatctttgtgcaaggcctgggtgagaatgttacaattgagtctgtggctgattacttcaagcagattggtattattaagacaaacaagaaaacgggacagcccatgattaatttgtacacagacagggaaactggcaagctgaagggagaggcaacggtctcttttgatgacccaccttcagctaaagcagctattgactggtttgatggtaaagaattctccggaaatcctatcaaggtctcatttgctactcgccgggcagactttaatcggggtggtggcaatggtcgtggaggccgagggcgaggaggacccatgggccgtggaggctatggaggtggtggcagtggtggtggtggccgaggaggatttcccagtggaggtggtggcggtggaggacagcagcgagctggtgactggaagtgtcctaatcccacctgtgagaatatgaacttctcttggaggaatgaatgcaaccagtgtaaggcccctaaaccagatggcccaggagggggaccaggtggctctcacatggggggtaactacggggatgatcgtcgtggtggcagaggaggctatgatcgaggcggctaccggggccgcggcggggaccgtggaggcttccgagggggccggggtggtggggacagaggtggctttggccctggcaagatggattccaggggtgagcacagacaggatcgcagggagaggccgtattaattagcctggctccccaggttctggaacagctttttgtcctgtacccagtgttaccctcgttattttgtaaccttccaattcctgatcacccaagggtttttttgtgtcggactatgtaattgtaactatacctctggttcccattaaaagtgaccattttagttaaa

SEQ ID NO: 404 - DNA, 5084 bp, Homo sapiens
  source 1..5084: mol_type = genomic DNA
acttaagcttcgacgcaggaggcggggctgctcagtcctccaggcgtcggtactcagcggtgttggaacttcgttgcttgcttgcctgtgcgcgcgtgcgcggacatggcctcaaacgattatacccaacaagcaacccaaagctatggggcctaccccacccagcccgggcagggctattcccagcagagcagtcagccctacggacagcagagttacagtggttatagccagtccacggacacttcaggctatggccagagcagctattcttcttatggccagagccagaacacaggctatggaactcagtcaactccccagggatatggctcgactggcggctatggcagtagccagagctcccaatcgtcttacgggcagcagtcctcctaccctggctatggccagcagccagctcccagcagcacctcgggaagttacggtagcagttctcagagcagcagctatgggcagccccagagtgggagctacagccagcagcctagctatggtggacagcagcaaagctatggacagcagcaaagctataatccccctcagggctatggacagcagaaccagtacaacagcagcagtggtggtggaggtggaggtggaggtggaggtaactatggccaagatcaatcctccatgagtagtggtggtggcagtggtggcggttatggcaatcaagaccagagtggtggaggtggcagcggtggctatggacagcaggaccgtggaggccgcggcaggggtggcagtggtggcggcggcggcggcggcggtggtggttacaaccgcagcagtggtggctatgaacccagaggtcgtggaggtggccgtggaggcagaggtggcatggggccctcgggaccaaggatcacgtcatgactccgaacaggataattcagacaacaacaccatctttgtgcaaggcctgggtgagaatgttacaattgagtctgtggctgattacttcaagcagattggtattattaagacaaacaagaaaacgggacagcccatgattaatttgtacacagacagggaaactggcaagctgaagggagaggcaacggtctcttttgatgacccaccttcagctaaagcagctattgactggtttgatggtaaagaattctccggaaatcctatcaaggtctcatttgctactcgccgggcagactttaatcggggtggtggcaatggtcgtggaggccgagggcgaggaggacccatgggccgtggaggctatggaggtggtggcagtggtggtggtggccgaggaggatttcccagtggaggtggtggcggtggaggacagcagcgagctggtgactggaagtgtcctaatcccacctgtgagaatatgaacttctcttggaggaatgaatgcaaccagtgtaaggcccctaaaccagatggcccaggagggggaccaggtggctctcacatggggggtaactacggggatgatcgtcgtggtggcagaggaggctatgatcgaggcggctaccggggccgcggcggggaccgtggaggcttccgagggggccggggtggtggggacagaggtggctttggccctggcaagatggattccaggggtgagcacagacaggatcgcagggagaggccgtattaattagcctggctccccaggttctggaacagctttttgtcctgtacccagtgttaccctcgttattttgtaaccttccaattcctgatcacccaagggtttttttgtgtcggactatgtaattgtaactatacctctggttcccattaaaagtgaccattttagttaaattttgttcctcttcccccttttcactttcctggaagatcgatgtcccgatcaggaaggtagagagttttcctgttcagattaccctgcccagcaggaactggaatacagtgttcggggagaaggccaaatgatatccttgagagcagagattaaacttttctgtcatggggaaagttggtgtataaatgagaaatgaagaacatgggatgtcatgagtgttggcctaaatttgcccagctatggggaatttttcctttaccacatttatttgcatactggtcttagtttatttgcagcagtttatccctttttaagaactctttgatcttttggcccttttaatggtgaggctcaaacaaactacatttaaatggggcagtattcagatttgaccatggtggagagcgcttagccactctgggtctttcacaggaaggagagtaactgagtgctgcaggagtttgtggagtggagtcaggatctaggaggtgagtgactcccttcctagctgccctggtgaacagcgcttgggtagatacctgctataaggagactggtctggctgggttactttcacatcctgcctgtactcagagggcttgaggtcattgacattatgagattttaggcttgatccctttttgattggagggtggaaggccctcctaagggaatgataagtgataagagggggaaggggttgcagccaatgagttaaaaccttagagcagtgctcctcagcctcttaccatgtggttgtaaacttgcacgtacctgccaaccagttatttagcatgctttttattttagttacacagagcgtaacattaacccaagagcagaaaggttttatttacagggttttcgaacttggtttgtaagacagctgccatcacaagcatagcttacaaatgtgctggggacccctaattgggaagtgctttcctctcaaatttttattttttatttttagagacagagtcttgctctgtcatccaggctggagtgcagtggcgtgatctcggctcactgtagcctctgcctcctgagtttaagcgattctcctgcctcaggagaatcccagcttctgagtagctgagactacaggcgtgggccaccatgcccacctagtttttgcatttttagtggaggtgtggtttcactgtgttggccaggctggtctcttaactcctgacctcaggtgatccacctgccttggcctcccaaagtgctggaattacaggcatgagccgctgcatctggccatcctctcaaattttcaagtgttccacaagtatgttctctactgaagagttgctgcatccttgaatcttgggtgatttgaggcacagaaactatgactttattttttgagatggagttttgctcttgttgcccaggctggagtgcaatggcacgtttttcggcttaccgcaactgccgcctcctgggttcaagcgatagctgggattacaggcatgcgccaccatgcccagctaatttatttgtatttttagtagagacggggtttctccatgttggtcaggctggtctcgaactcccgacctcaggtgatgtgcacacctcagcctcccaataaaccatgacttttaagaggaatagcaggtttacttcccctgccagcattggggtgctctctaagcaacagtaggcggagagtggtctggcgtattaaaaacaaaggatcgtcaagtgggccttcccaggcattgctttgacttagtacatgtagaggatgtggcagttctctccgtccctgccactgctggtttctttgttaaatgtttagttgaaatggcctgatacgatatttgagtagttcactgttggtgctttgcctagcaggattctaatcttgctttggttgtggtcccctgatgccctcctgttaggagtggaggaggtcgaagctccttgtaagatatgattactgggaccattagtgtcaagttcctgtgtccttcaaatggcatatgtgattggccttgaccttaaaaggaaatagggtcccaggtgactgtttagtgggtaggtccagtttggggggatcttccaggagaatggatagagacacctagcagcagagagaacattggtgcctctcaagccaacctcccacctcagcctcccaagtagctgggactacaggtgcttcctcgctaccacacctgggtaattttttttttaattacttttttttttttaagaaacagggtttcactgggttgcccaggctggtcttgaactggcctcaagtgacctgcctgcctcagcctcccaaagtgctgggatcacaggtgtgacccactgcgtttggccagaatactctattcttactgaatgattgaaatctgtcttgaagcattaggtgtcccatttttgtgagttggaattgggacaggctaagtaggaagtgaggagggtggggagagctgtgctgtaggtctgtttgtcccttccttgatgtagccttcagttagccctttcagcttttttccccatcttgtgccgggccttcctgggtttcagtacttggatgtagggctgcagttatgtcagtggtgggtagattgaccaggaattaaggtctagggtccagcccatgtgagacttgactcactgatctacctttaggcatgtcttccttccagtctcatcctttttaaattttttttttttttttgagacggtctcactctcacccaggctggattgcagtggtgtgatctcgaccaactgcaacctctgcctcccacccgcaagctatctgcccacctcagcctctggagtagctgggacgggactacaggcacctgccaccatgactggctaatttttttttgtattttttgtggagatggggtcttgccatgttgctcaggctggtctggtctcaaaactgctctgggctcaagtgattgtcccactttggcctcccagagtgctgggattaaggtgtgagatactgtgtccggctatgaaaattttatttttaattaacttgtatatatttatggggtacaatgtcctatttctgtacatgtacacattgtggaatcaaatcaggctaatatatccatcacttcatatcattagcatgaatgagaacatacaaagccactcttagaaaattttgaaatttatgttatttcagcccttttatgctggaggttgcaaatgttttgtgaataatcagaccaaaaataaaaacaaaaaatgattgacttcagtcattcagtaagaa

SEQ ID NO: 405 - DNA, 11176 bp, Homo sapiens
  source 1..11176: mol_type = genomic DNA
ggggcccgcggggagcgctggctgcgggcggtgagctgagctcgcccccggggagctgtggccggcgcccctgccggttccctgagcagcggacgttcatgctgggagggcggcgggttggaagcaggtgccaccatggctagtggcagctgtcaggggtgcgaagaggacgaggaaactctgaagaagttgatagtcaggctgaacaatgtccaggaaggaaaacagatagaaacgctggtccaaatcctggaggatctgctggtgttcacgtactccgagcgcgcctccaagttatttcaaggcaaaaatatccatgtgcctctgttgatcgtcttggactcctatatgagagtcgcgagtgtgcagcaggtgggttggtcacttctgtgcaaattaatagaagtctgtccaggtacaatgcaaagcttaatgggaccccaggatgttggaaatgattgggaagtccttggtgttcaccaattgattcttaaaatgctaacagttcataatgccagtgtaaacttgtcagtgattggactgaagaccttagatctcctcctaacttcaggtaaaatcaccttgctgatattggatgaagaaagtgatattttcatgttaatttttgatgccatgcactcatttccagccaatgatgaagtccagaaacttggatgcaaagctttacatgtgctgtttgagagagtctcagaggagcaactgactgaatttgttgagaacaaagattatatgatattgttaagtgcgttaacaaattttaaagatgaagaggaaattgtgcttcatgtgctgcattgtttacattccctagcgattccttgcaataatgtggaagtcctcatgagtggcaatgtcaggtgttataatattgtggtggaagctatgaaagcattccctatgagtgaaagaattcaagaagtgagttgctgtttgctccataggcttacattaggtaattttttcaatatcctggtattaaacgaagtccatgagtttgtggtgaaagctgtgcagcagtacccagagaatgcagcattgcagatctcagcgctcagctgtttggccctcctcactgagactattttcttaaatcaagatttagaggaaaagaatgagaatcaagagaatgatgatgagggggaagaagataaattgttttggctggaagcctgttacaaagcattaacgtggcatagaaagaacaagcacgtgcaggaggccgcatgctgggcactaaataatctccttatgtaccaaaacagtttacatgagaagattggagatgaagatggccatttcccagctcatagggaagtgatgctctccatgctgatgcattcttcatcaaaggaagttttccaggcatctgcgaatgcattgtcaactctcttagaacaaaatgttaatttcagaaaaatactgttatcaaaaggaatacacctgaatgttttggagttaatgcagaagcatatacattctcctgaagtggctgaaagtggctgtaaaatgctaaatcatctttttgaaggaagcaacacttccctggatataatggcagcagtggtccccaaaatactaacagttatgaaacgtcatgagacatcattaccagtgcagctggaggcgcttcgagctattttacattttatagtgcctggcatgccagaagaatccagggaggatacagaatttcatcataagctaaatatggttaaaaaacagtgtttcaagaatgatattcacaaactggtcctagcagctttgaacaggttcattggaaatcctgggattcagaaatgtggattaaaagtaatttcttctattgtacattttcctgatgcattagagatgttatccctggaaggtgctatggattcagtgcttcacacactgcagatgtatccagatgaccaagaaattcagtgtctgggtttaagtcttataggatacttgattacaaagaagaatgtgttcataggaactggacatctgctggcaaaaattctggtttccagcttataccgatttaaggatgttgctgaaatacagactaaaggatttcagacaatcttagcaatcctcaaattgtcagcatctttttctaagctgctggtgcatcattcatttgacttagtaatattccatcaaatgtcttccaatatcatggaacaaaaggatcaacagtttctaaacctctgttgcaagtgttttgcaaaagtagctatggatgattacttaaaaaatgtgatgctagagagagcgtgtgatcagaataacagcatcatggttgaatgcttgcttctattgggagcagatgccaatcaagcaaaggagggatcttctttaatttgtcaggtatgtgagaaagagagcagtcccaaattggtggaactcttactgaatagtggatctcgtgaacaagatgtacgaaaagcgttgacgataagcattgggaaaggtgacagccagatcatcagcttgctcttaaggaggctggccctggatgtggccaacaatagcatttgccttggaggattttgtataggaaaagttgaaccttcttggcttggtcctttatttccagataagacttctaatttaaggaaacaaacaaatatagcatctacactagcaagaatggtgatcagatatcagatgaaaagtgctgtggaagaaggaacagcctcaggcagcgatggaaatttttctgaagatgtgctgtctaaatttgatgaatggacctttattcctgactcttctatggacagtgtgtttgctcaaagtgatgacctggatagtgaaggaagtgaaggctcatttcttgtgaaaaagaaatctaattcaattagtgtaggagaattttaccgagatgccgtattacagcgttgctcaccaaatttgcaaagacattccaattccttggggcccatttttgatcatgaagatttactgaagcgaaaaagaaaaatattatcttcagatgattcactcaggtcatcaaaacttcaatcccatatgaggcattcagacagcatttcttctctggcttctgagagagaatatattacatcactagacctttcagcaaatgaactaagagatattgatgccctaagccagaaatgctgtataagtgttcatttggagcatcttgaaaagctggagcttcaccagaatgcactcacgagctttccacaacagctatgtgaaactctgaagagtttgacacatttggacttgcacagtaataaatttacatcatttccttcttatttgttgaaaatgagttgtattgctaatcttgatgtctctcgaaatgacattggaccctcagtggttttagatcctacagtgaaatgtccaactctgaaacagtttaacctgtcatataaccagctgtcttttgtacctgagaacctcactgatgtggtagagaaactggagcagctcattttagaaggaaataaaatatcagggatatgctcccccttgagactgaaggaactgaagattttaaaccttagtaagaaccacatttcatccctatcagagaactttcttgaggcttgtcctaaagtggagagtttcagtgccagaatgaattttcttgctgctatgcctttcttgcctccttctatgacaatcctaaaattatctcagaacaaattttcctgtattccagaagcaattttaaatcttccacacttgcggtctttagatatgagcagcaatgatattcagtacctaccaggtcccgcacactggaaatctttgaacttaagggaactcttatttagccataatcagatcagcatcttggacttgagtgaaaaagcatatttatggtctagagtagagaaactgcatctttctcacaataaactgaaagagattcctcctgagattggctgtcttgaaaatctgacatctctggatgtcagttacaacttggaactaagatcctttcccaatgaaatggggaaattaagcaaaatatgggatcttcctttggatgaactgcatcttaactttgattttaaacatataggatgtaaagccaaagacatcataaggtttcttcaacagcgattaaaaaaggctgtgccttataaccgaatgaaacttatgattgtgggaaatactgggagtggtaaaaccaccttattgcagcaattaatgaaaaccaagaaatcagatcttggaatgcaaagtgccacagttggcatagatgtgaaagactggcctatccaaataagagacaaaagaaagagagatctcgtcctaaatgtgtgggattttgcaggtcgtgaggaattctatagtactcatccccattttatgacgcagcgagcattgtaccttgctgtctatgacctcagcaagggacaggctgaagttgatgccatgaagccttggctcttcaatataaaggctcgcgcttcttcttcccctgtgattctcgttggcacacatttggatgtttctgatgagaagcaacgcaaagcctgcatgagtaaaatcaccaaggaactcctgaataagcgagggttccctgccatacgagattaccactttgtgaatgccaccgaggaatctgatgctttggcaaaacttcggaaaaccatcataaacgagagccttaatttcaagatccgagatcagcttgttgttggacagctgattccagactgctatgtagaacttgaaaaaatcattttatcggagcgtaaaaatgtgccaattgaatttcccgtaattgaccggaaacgattattacaactagtgagagaaaatcagctgcagttagatgaaaatgagcttcctcacgcagttcactttctaaatgaatcaggagtccttcttcattttcaagacccagcactgcagttaagtgacttgtactttgtggaacccaagtggctttgtaaaatcatggcacagattttgacagtgaaagtggaaggttgtccaaaacaccctaagggcattatttcgcgtagagatgtggaaaaatttctttcaaaaaaaaggaaatttccaaagaactacatgtcacagtattttaagctcctagaaaaattccagattgctttgccaataggagaagaatatttgctggttccaagcagtttgtctgaccacaggcctgtgatagagcttccccattgtgagaactctgaaattatcatccgactatatgaaatgccttattttccaatgggattttggtcaagattaatcaatcgattacttgagatttcaccttacatgctttcagggagagaacgagcacttcgcccaaacagaatgtattggcgacaaggcatttacttaaattggtctcctgaagcttattgtctggtaggatctgaagtcttagacaatcatccagagagtttcttaaaaattacagttccttcttgtagaaaaggctgtattcttttgggccaagttgtggaccacattgattctctcatggaagaatggtttcctgggttgctggagattgatatttgtggtgaaggagaaactctgttgaagaaatgggcattatatagttttaatgatggtgaagaacatcaaaaaatcttacttgatgacttgatgaagaaagcagaggaaggagatctcttagtaaatccagatcaaccaaggctcaccattccaatatctcagattgcccctgacttgattttggctgacctgcctagaaatattatgttgaataatgatgagttggaatttgaacaagctccagagtttctcctaggtgatggcagttttggatcagtttaccgagcagcctatgaaggagaagaagtggctgtgaagatttttaataaacatacatcactcaggctgttaagacaagagcttgtggtgctttgccacctccaccaccccagtttgatatctttgctggcagctgggattcgtccccggatgttggtgatggagttagcctccaagggttccttggatcgcctgcttcagcaggacaaagccagcctcactagaaccctacagcacaggattgcactccacgtagctgatggtttgagatacctccactcagccatgattatataccgagacctgaaaccccacaatgtgctgcttttcacactgtatcccaatgctgccatcattgcaaagattgctgactacggcattgctcagtactgctgtagaatggggataaaaacatcagagggcacaccagggtttcgtgcacctgaagttgccagaggaaatgtcatttataaccaacaggctgatgtttattcatttggtttactactctatgacattttgacaactggaggtagaatagtagagggtttgaagtttccaaatgagtttgatgaattagaaatacaaggaaaattacctgatccagttaaagaatatggttgtgccccatggcctatggttgagaaattaattaaacagtgtttgaaagaaaatcctcaagaaaggcctacttctgcccaggtctttgacattttgaattcagctgaattagtctgtctgacgagacgcattttattacctaaaaacgtaattgttgaatgcatggttgctacacatcacaacagcaggaatgcaagcatttggctgggctgtgggcacaccgacagaggacagctctcatttcttgacttaaatactgaaggatacacttctgaggaagttgctgatagtagaatattgtgcttagccttggtgcatcttcctgttgaaaaggaaagctggattgtgtctgggacacagtctggtactctcctggtcatcaataccgaagatgggaaaaagagacataccctagaaaagatgactgattctgtcacttgtttgtattgcaattccttttccaagcaaagcaaacaaaaaaattttcttttggttggaaccgctgatggcaagttagcaatttttgaagataagactgttaagcttaaaggagctgctcctttgaagatactaaatataggaaatgtcagtactccattgatgtgtttgagtgaatccacaaattcaacggaaagaaatgtaatgtggggaggatgtggcacaaagattttctccttttctaatgatttcaccattcagaaactcattgagacaagaacaagccaactgttttcttatgcagctttcagtgattccaacatcataacagtggtggtagacactgctctctatattgctaagcaaaatagccctgttgtggaagtgtgggataagaaaactgaaaaactctgtggactaatagactgcgtgcactttttaagggaggtaatggtaaaagaaaacaaggaatcaaaacacaaaatgtcttattctgggagagtgaaaaccctctgccttcagaagaacactgctctttggataggaactggaggaggccatattttactcctggatctttcaactcgtcgacttatacgtgtaatttacaacttttgtaattcggtcagagtcatgatgacagcacagctaggcaagtttctttcctttagatatttttcatattctctaagtcttataaaatatgcctttattttacgtttacattttctctgaactttccagtgtcatatggatggtcttggagggtcacacagtgaaacataagactggtataaattgtgaatagggtcattacagaagtggagggagtaaatgctctcagtcccacaagagaagcagattactgcagctgaacactcagtttgggtcttacttgcttttttcctttttacctaaggcaaaaatgggaaatacatggtattgaatatattttactttttgagcaaagaaaataaagaaaatgtttgttttaatcatagtctagcctcccagcttgttaaagaatctcatttggtttttcattctataacaaatcttttttcttgcagcaatacatgctgaactgcacaacctacaaatattgacaaatcatattttactcaaactttgtctttttttgcttctatttttatatttaaatatgataaaattgtgatagcacataaaatatattttctgcataaatatatttgcgtcttcctttgataataatttgttttagaaaataacaataatagcatatatacaaaagtttacaaaaacgacactatggggtttaattctgaaaaaaactagaatttatgtaactttagcaaataatgaatgttttgaacatggtgaagaaaatatattcattgcaagtatatgtgaaagaggaacatgtgtttttctagcaccttcacctatttttcatttatagactttagagttgcacaggagttacaattagatgctcttaatgactgtaaactattaagatacatgtccacacaagcagagcagtaggtctctcaataggttgtctcagtagtcttattctaccaaagttgttgcattctctagttgaattgtatgtactttgggacccaaatagcttgcttataactgaagttatagtggaatgtctatgggttatagtttgattttaaaataaagatcaattggaggatagcctacaaggtgctgcatgagctggcttcactgtacctctcctgcctccatcatctaccacattcctaccagatcttgcttgtctagatgaacatccagttcttctcaattactatgctatattttgcctcagggatttgcacatgctgtttatttctttgcttagttaacatagctttttttcatgcttatttaactcatatgctttgaaatgttagctcctgtgtcaaaacctctgagaagccaacactgattaggtcaaagttcccgctttgggttcccataacagctttcttgcatagttttgatcatggtcatatttttttttcattaatgctagtctcttcactagaatataaactccaagacggttgggttagtgtgtttttgtttaccccttttttcccaggatctagcctagggcctacatagaagacttttgatgcaaatttgttgaataaattagtgaatgatttgaaaagaaaatatgatattttgacatagtatcagtatatccatccatctaagtgtccatctaaatactcatatttgtactaaatactcatatttgtaccttaccatatccaaagaacttttcacacacattacctcgtttaacattgtaactttgggaagggtaatgtataaatactgagcctattttatagaaaggttaagctgttttctcagactcacataattaagaattgcagcaaggagtggatcacagattttgttattttttaaaaaaatgctggtctttattcaatataattgaagggtcacctagaaaatagaattgtgaattcagttccaaggtatttgtgtcttaaactatgaacaactttacttttttttcaggccagtttaatatatagttttaacagaaaacttacatattttgtttttgtaaaggaagccttaaaaatgtcatgctggtattgggctacaaccggaaaaatactgaagagatacaatcttgcttgaccgtttgggacatcaatcttccacatgaagtgcaaaatttagaaaaacacattgaagtgagaaaagaattagctgaaaaaatgagacgaacatctgttgagtaagagagaaataggaattgtctttggataggaaaattattctctcctcttgtaaatatttattttaaaaatgttcacatggaaagggtactcacattttttgaaatagctcgtgtgtatgaaggaatgttattatttttaatttaaatatatgtaaaaatacttaccagtaaatgtgtattttaaagaactatttaaaacacaatgttatatttcttataaataccagttactttcgttcattaattaatgaaaataaatctgtgaagtacctaatttaagtactcatactaaaatttataaggccgataattttttgttttcttgtctgtaatggaggtaaactttattttaaattctgtgcttaagacaggactattgcttgtcgatttttctagaaatctgcacggtataatgaaaatattaagacagtttcccatgtaatgtattccttcttagattgcatcgaaatgcactatcatatatgcttgtaaatattcaaatgaatttgcactaataaagtcctttgttggtatgtgaattctctttgttgctgttgcaaacagtgcatcttacacaacttcactcaattcaaaagaaaactccattaaaagtactaatgaaaaaacatgacatactgtcaaagtcctcatatctaggaaagacacagaaactctctttgtcacagaaactctctgtgtctttcctagacataatagagttgtttttcaactctatgtttgaatgtggataccctgaattttgtataattagtgtaaatacagtgttcagtccttcaagtgatatttttatttttttattcataccactagctacttgttttctaatctgcttcattctaatgcttatattcatcttttccctaaatttgtgatgctgcagatcctacatcattcagatagaaacctttttttttttcagaattatagaattccacagctcctaccaagaccatgaggataaatatctaacacttttcagttgctgaaggagaaaggagctttagttatgatggataaaaatatctgccaccctaggcttccaaattatacttaaattgtttacatagcttaccacaataggagtatcagggccaaatacctatgtaataatttgaggtcatttctgctttaggaaaagtactttcggtaaattctttggccctgaccagtattcattatttcagataattccctgtgataggacaactagtacatttaatattctcagaacttatggcattttactatgtgaaaactttaaatttatttatattaagggtaatcaaattcttaaagatgaaagattttctgtattttaaaggaagctatgctttaacttgttatgtaattaacaaaaaaatcatatataatagagctctttgttccagtgttatctctttcattgttactttgtatttgcaattttttttaccaaagacaaattaaaaaaatgaataccatatttaaatggaataataaaggttttttaaaaactttaaa

SEQ ID NO: 406 - DNA, 9239 bp, Homo sapiens
  source 1..9239: mol_type = genomic DNA
ggggcccgcggggagcgctggctgcgggcggtgagctgagctcgcccccggggagctgtggccggcgcccctgccggttccctgagcagcggacgttcatgctgggagggcggcgggttggaagcaggtgccaccatggctagtggcagctgtcaggggtgcgaagaggacgaggaaactctgaagaagttgatagtcaggctgaacaatgtccaggaaggaaaacagatagaaacgctggtccaaatcctggaggatctgctggtgttcacgtactccgagcgcgcctccaagttatttcaaggcaaaaatatccatgtgcctctgttgatcgtcttggactcctatatgagagtcgcgagtgtgcagcaggtgggttggtcacttctgtgcaaattaatagaagtctgtccaggtacaatgcaaagcttaatgggaccccaggatgttggaaatgattgggaagtccttggtgttcaccaattgattcttaaaatgctaacagttcataatgccagtgtaaacttgtcagtgattggactgaagaccttagatctcctcctaacttcaggtaaaatcaccttgctgatattggatgaagaaagtgatattttcatgttaatttttgatgccatgcactcatttccagccaatgatgaagtccagaaacttggatgcaaagctttacatgtgctgtttgagagagtctcagaggagcaactgactgaatttgttgagaacaaagattatatgatattgttaagtgcgttaacaaattttaaagatgaagaggaaattgtgcttcatgtgctgcattgtttacattccctagcgattccttgcaataatgtggaagtcctcatgagtggcaatgtcaggtgttataatattgtggtggaagctatgaaagcattccctatgagtgaaagaattcaagaagtgagttgctgtttgctccataggcttacattaggtaattttttcaatatcctggtattaaacgaagtccatgagtttgtggtgaaagctgtgcagcagtacccagagaatgcagcattgcagatctcagcgctcagctgtttggccctcctcactgagactattttcttaaatcaagatttagaggaaaagaatgagaatcaagagaatgatgatgagggggaagaagataaattgttttggctggaagcctgttacaaagcattaacgtggcatagaaagaacaagcacgtgcaggaggccgcatgctgggcactaaataatctccttatgtaccaaaacagtttacatgagaagattggagatgaagatggccatttcccagctcatagggaagtgatgctctccatgctgatgcattcttcatcaaaggaagttttccaggcatctgcgaatgcattgtcaactctcttagaacaaaatgttaatttcagaaaaatactgttatcaaaaggaatacacctgaatgttttggagttaatgcagaagcatatacattctcctgaagtggctgaaagtggctgtaaaatgctaaatcatctttttgaaggaagcaacacttccctggatataatggcagcagtggtccccaaaatactaacagttatgaaacgtcatgagacatcattaccagtgcagctggaggcgcttcgagctattttacattttatagtgcctggcatgccagaagaatccagggaggatacagaatttcatcataagctaaatatggttaaaaaacagtgtttcaagaatgatattcacaaactggtcctagcagctttgaacaggttcattggaaatcctgggattcagaaatgtggattaaaagtaatttcttctattgtacattttcctgatgcattagagatgttatccctggaaggtgctatggattcagtgcttcacacactgcagatgtatccagatgaccaagaaattcagtgtctgggtttaagtcttataggatacttgattacaaagaagaatgtgttcataggaactggacatctgctggcaaaaattctggtttccagcttataccgatttaaggatgttgctgaaatacagactaaaggatttcagacaatcttagcaatcctcaaattgtcagcatctttttctaagctgctggtgcatcattcatttgacttagtaatattccatcaaatgtcttccaatatcatggaacaaaaggatcaacagtttctaaacctctgttgcaagtgttttgcaaaagtagctatggatgattacttaaaaaatgtgatgctagagagagcgtgtgatcagaataacagcatcatggttgaatgcttgcttctattgggagcagatgccaatcaagcaaaggagggatcttctttaatttgtcaggtatgtgagaaagagagcagtcccaaattggtggaactcttactgaatagtggatctcgtgaacaagatgtacgaaaagcgttgacgataagcattgggaaaggtgacagccagatcatcagcttgctcttaaggaggctggccctggatgtggccaacaatagcatttgccttggaggattttgtataggaaaagttgaaccttcttggcttggtcctttatttccagataagacttctaatttaaggaaacaaacaaatatagcatctacactagcaagaatggtgatcagatatcagatgaaaagtgctgtggaagaaggaacagcctcaggcagcgatggaaatttttctgaagatgtgctgtctaaatttgatgaatggacctttattcctgactcttctatggacagtgtgtttgctcaaagtgatgacctggatagtgaaggaagtgaaggctcatttcttgtgaaaaagaaatctaattcaattagtgtaggagaattttaccgagatgccgtattacagcgttgctcaccaaatttgcaaagacattccaattccttggggcccatttttgatcatgaagatttactgaagcgaaaaagaaaaatattatcttcagatgattcactcaggtcatcaaaacttcaatcccatatgaggcattcagacagcatttcttctctggcttctgagagagaatatattacatcactagacctttcagcaaatgaactaagagatattgatgccctaagccagaaatgctgtataagtgttcatttggagcatcttgaaaagctggagcttcaccagaatgcactcacgagctttccacaacagctatgtgaaactctgaagagtttgacacatttggacttgcacagtaataaatttacatcatttccttcttatttgttgaaaatgagttgtattgctaatcttgatgtctctcgaaatgacattggaccctcagtggttttagatcctacagtgaaatgtccaactctgaaacagtttaacctgtcatataaccagctgtcttttgtacctgagaacctcactgatgtggtagagaaactggagcagctcattttagaaggaaataaaatatcagggatatgctcccccttgagactgaaggaactgaagattttaaaccttagtaagaaccacatttcatccctatcagagaactttcttgaggcttgtcctaaagtggagagtttcagtgccagaatgaattttcttgctgctatgcctttcttgcctccttctatgacaatcctaaaattatctcagaacaaattttcctgtattccagaagcaattttaaatcttccacacttgcggtctttagatatgagcagcaatgatattcagtacctaccaggtcccgcacactggaaatctttgaacttaagggaactcttatttagccataatcagatcagcatcttggacttgagtgaaaaagcatatttatggtctagagtagagaaactgcatctttctcacaataaactgaaagagattcctcctgagattggctgtcttgaaaatctgacatctctggatgtcagttacaacttggaactaagatcctttcccaatgaaatggggaaattaagcaaaatatgggatcttcctttggatgaactgcatcttaactttgattttaaacatataggatgtaaagccaaagacatcataaggtttcttcaacagcgattaaaaaaggctgtgccttataaccgaatgaaacttatgattgtgggaaatactgggagtggtaaaaccaccttattgcagcaattaatgaaaaccaagaaatcagatcttggaatgcaaagtgccacagttggcatagatgtgaaagactggcctatccaaataagagacaaaagaaagagagatctcgtcctaaatgtgtgggattttgcaggtcgtgaggaattctatagtactcatccccattttatgacgcagcgagcattgtaccttgctgtctatgacctcagcaagggacaggctgaagttgatgccatgaagccttggctcttcaatataaaggctcgcgcttcttcttcccctgtgattctcgttggcacacatttggatgtttctgatgagaagcaacgcaaagcctgcatgagtaaaatcaccaaggaactcctgaataagcgagggttccctgccatacgagattaccactttgtgaatgccaccgaggaatctgatgctttggcaaaacttcggaaaaccatcataaacgagagccttaatttcaagatccgagatcagcttgttgttggacagctgattccagactgctatgtagaacttgaaaaaatcattttatcggagcgtaaaaatgtgccaattgaatttcccgtaattgaccggaaacgattattacaactagtgagagaaaatcagctgcagttagatgaaaatgagcttcctcacgcagttcactttctaaatgaatcaggagtccttcttcattttcaagacccagcactgcagttaagtgacttgtactttgtggaacccaagtggctttgtaaaatcatggcacagattttgacagtgaaagtggaaggttgtccaaaacaccctaagggcattatttcgcgtagagatgtggaaaaatttctttcaaaaaaaaggaaatttccaaagaactacatgtcacagtattttaagctcctagaaaaattccagattgctttgccaataggagaagaatatttgctggttccaagcagtttgtctgaccacaggcctgtgatagagcttccccattgtgagaactctgaaattatcatccgactatatgaaatgccttattttccaatgggattttggtcaagattaatcaatcgattacttgagatttcaccttacatgctttcagggagagaacgagcacttcgcccaaacagaatgtattggcgacaaggcatttacttaaattggtctcctgaagcttattgtctggtaggatctgaagtcttagacaatcatccagagagtttcttaaaaattacagttccttcttgtagaaaaggctgtattcttttgggccaagttgtggaccacattgattctctcatggaagaatggtttcctgggttgctggagattgatatttgtggtgaaggagaaactctgttgaagaaatgggcattatatagttttaatgatggtgaagaacatcaaaaaatcttacttgatgacttgatgaagaaagcagaggaaggagatctcttagtaaatccagatcaaccaaggctcaccattccaatatctcagattgcccctgacttgattttggctgacctgcctagaaatattatgttgaataatgatgagttggaatttgaacaagctccagagtttctcctaggtgatggcagttttggatcagtttaccgagcagcctatgaaggagaagaagtggctgtgaagatttttaataaacatacatcactcaggctgttaagacaagagcttgtggtgctttgccacctccaccaccccagtttgatatctttgctggcagctgggattcgtccccggatgttggtgatggagttagcctccaagggttccttggatcgcctgcttcagcaggacaaagccagcctcactagaaccctacagcacaggattgcactccacgtagctgatggtttgagatacctccactcagccatgattatataccgagacctgaaaccccacaatgtgctgcttttcacactgtatcccaatgctgccatcattgcaaagattgctgactacggcattgctcagtactgctgtagaatggggataaaaacatcagagggcacaccagggtttcgtgcacctgaagttgccagaggaaatgtcatttataaccaacaggctgatgtttattcatttggtttactactctatgacattttgacaactggaggtagaatagtagagggtttgaagtttccaaatgagtttgatgaattagaaatacaaggaaaattacctgatccagttaaagaatatggttgtgccccatggcctatggttgagaaattaattaaacagtgtttgaaagaaaatcctcaagaaaggcctacttctgcccaggtctttgacattttgaattcagctgaattagtctgtctgacgagacgcattttattacctaaaaacgtaattgttgaatgcatggttgctacacatcacaacagcaggaatgcaagcatttggctgggctgtgggcacaccgacagaggacagctctcatttcttgacttaaatactgaaggatacacttctgaggaagttgctgatagtagaatattgtgcttagccttggtgcatcttcctgttgaaaaggaaagctggattgtgtctgggacacagtctggtactctcctggtcatcaataccgaagatgggaaaaagagacataccctagaaaagatgactgattctgtcacttgtttgtattgcaattccttttccaagcaaagcaaacaaaaaaattttcttttggttggaaccgctgatggcaagttagcaatttttgaagataagactgttaagcttaaaggagctgctcctttgaagatactaaatataggaaatgtcagtactccattgatgtgtttgagtgaatccacaaattcaacggaaagaaatgtaatgtggggaggatgtggcacaaagattttctccttttctaatgatttcaccattcagaaactcattgagacaagaacaagccaactgttttcttatgcagctttcagtgattccaacatcataacagtggtggtagacactgctctctatattgctaagcaaaatagccctgttgtggaagtgtgggataagaaaactgaaaaactctgtggactaatagactgcgtgcactttttaagggaggtaatggtaaaagaaaacaaggaatcaaaacacaaaatgtcttattctgggagagtgaaaaccctctgccttcagaagaacactgctctttggataggaactggaggaggccatattttactcctggatctttcaactcgtcgacttatacgtgtaatttacaacttttgtaattcggtcagagtcatgatgacagcacagctaggaagccttaaaaatgtcatgctggtattgggctacaaccggaaaaatactgaaggtacacaaaagcagaaagagatacaatcttgcttgaccgtttgggacatcaatcttccacatgaagtgcaaaatttagaaaaacacattgaagtgagaaaagaattagctgaaaaaatgagacgaacatctgttgagtaagagagaaataggaattgtctttggataggaaaattattctctcctcttgtaaatatttattttaaaaatgttcacatggaaagggtactcacattttttgaaatagctcgtgtgtatgaaggaatgttattatttttaatttaaatatatgtaaaaatacttaccagtaaatgtgtattttaaagaactatttaaaacacaatgttatatttcttataaataccagttactttcgttcattaattaatgaaaataaatctgtgaagtacctaatttaagtactcatactaaaatttataaggccgataattttttgttttcttgtctgtaatggaggtaaactttattttaaattctgtgcttaagacaggactattgcttgtcgatttttctagaaatctgcacggtataatgaaaatattaagacagtttcccatgtaatgtattccttcttagattgcatcgaaatgcactatcatatatgcttgtaaatattcaaatgaatttgcactaataaagtcctttgttggtatgtgaattctctttgttgctgttgcaaacagtgcatcttacacaacttcactcaattcaaaagaaaactccattaaaagtactaatgaaaaaacatgacatactgtcaaagtcctcatatctaggaaagacacagaaactctctttgtcacagaaactctctgtgtctttcctagacataatagagttgtttttcaactctatgtttgaatgtggataccctgaattttgtataattagtgtaaatacagtgttcagtccttcaagtgatatttttatttttttattcataccactagctacttgttttctaatctgcttcattctaatgcttatattcatcttttccctaaatttgtgatgctgcagatcctacatcattcagatagaaacctttttttttttcagaattatagaattccacagctcctaccaagaccatgaggataaatatctaacacttttcagttgctgaaggagaaaggagctttagttatgatggataaaaatatctgccaccctaggcttccaaattatacttaaattgtttacatagcttaccacaataggagtatcagggccaaatacctatgtaataatttgaggtcatttctgctttaggaaaagtactttcggtaaattctttggccctgaccagtattcattatttcagataattccctgtgataggacaactagtacatttaatattctcagaacttatggcattttactatgtgaaaactttaaatttatttatattaagggtaatcaaattcttaaagatgaaagattttctgtattttaaaggaagctatgctttaacttgttatgtaattaacaaaaaaatcatatataatagagctctttgttccagtgttatctctttcattgttactttgtatttgcaattttttttaccaaagacaaattaaaaaaatgaataccatatttaaatggaataataaaggttttttaaaaactttaaa

SEQ ID NO: 407 - DNA, 9221 bp, Homo sapiens
  source 1..9221: mol_type = genomic DNA
ggggcccgcggggagcgctggctgcgggcggtgagctgagctcgcccccggggagctgtggccggcgcccctgccggttccctgagcagcggacgttcatgctgggagggcggcgggttggaagcaggtgccaccatggctagtggcagctgtcaggggtgcgaagaggacgaggaaactctgaagaagttgatagtcaggctgaacaatgtccaggaaggaaaacagatagaaacgctggtccaaatcctggaggatctgctggtgttcacgtactccgagcgcgcctccaagttatttcaaggcaaaaatatccatgtgcctctgttgatcgtcttggactcctatatgagagtcgcgagtgtgcagcaggtgggttggtcacttctgtgcaaattaatagaagtctgtccaggtacaatgcaaagcttaatgggaccccaggatgttggaaatgattgggaagtccttggtgttcaccaattgattcttaaaatgctaacagttcataatgccagtgtaaacttgtcagtgattggactgaagaccttagatctcctcctaacttcaggtaaaatcaccttgctgatattggatgaagaaagtgatattttcatgttaatttttgatgccatgcactcatttccagccaatgatgaagtccagaaacttggatgcaaagctttacatgtgctgtttgagagagtctcagaggagcaactgactgaatttgttgagaacaaagattatatgatattgttaagtgcgttaacaaattttaaagatgaagaggaaattgtgcttcatgtgctgcattgtttacattccctagcgattccttgcaataatgtggaagtcctcatgagtggcaatgtcaggtgttataatattgtggtggaagctatgaaagcattccctatgagtgaaagaattcaagaagtgagttgctgtttgctccataggcttacattaggtaattttttcaatatcctggtattaaacgaagtccatgagtttgtggtgaaagctgtgcagcagtacccagagaatgcagcattgcagatctcagcgctcagctgtttggccctcctcactgagactattttcttaaatcaagatttagaggaaaagaatgagaatcaagagaatgatgatgagggggaagaagataaattgttttggctggaagcctgttacaaagcattaacgtggcatagaaagaacaagcacgtgcaggaggccgcatgctgggcactaaataatctccttatgtaccaaaacagtttacatgagaagattggagatgaagatggccatttcccagctcatagggaagtgatgctctccatgctgatgcattcttcatcaaaggaagttttccaggcatctgcgaatgcattgtcaactctcttagaacaaaatgttaatttcagaaaaatactgttatcaaaaggaatacacctgaatgttttggagttaatgcagaagcatatacattctcctgaagtggctgaaagtggctgtaaaatgctaaatcatctttttgaaggaagcaacacttccctggatataatggcagcagtggtccccaaaatactaacagttatgaaacgtcatgagacatcattaccagtgcagctggaggcgcttcgagctattttacattttatagtgcctggcatgccagaagaatccagggaggatacagaatttcatcataagctaaatatggttaaaaaacagtgtttcaagaatgatattcacaaactggtcctagcagctttgaacaggttcattggaaatcctgggattcagaaatgtggattaaaagtaatttcttctattgtacattttcctgatgcattagagatgttatccctggaaggtgctatggattcagtgcttcacacactgcagatgtatccagatgaccaagaaattcagtgtctgggtttaagtcttataggatacttgattacaaagaagaatgtgttcataggaactggacatctgctggcaaaaattctggtttccagcttataccgatttaaggatgttgctgaaatacagactaaaggatttcagacaatcttagcaatcctcaaattgtcagcatctttttctaagctgctggtgcatcattcatttgacttagtaatattccatcaaatgtcttccaatatcatggaacaaaaggatcaacagtttctaaacctctgttgcaagtgttttgcaaaagtagctatggatgattacttaaaaaatgtgatgctagagagagcgtgtgatcagaataacagcatcatggttgaatgcttgcttctattgggagcagatgccaatcaagcaaaggagggatcttctttaatttgtcaggtatgtgagaaagagagcagtcccaaattggtggaactcttactgaatagtggatctcgtgaacaagatgtacgaaaagcgttgacgataagcattgggaaaggtgacagccagatcatcagcttgctcttaaggaggctggccctggatgtggccaacaatagcatttgccttggaggattttgtataggaaaagttgaaccttcttggcttggtcctttatttccagataagacttctaatttaaggaaacaaacaaatatagcatctacactagcaagaatggtgatcagatatcagatgaaaagtgctgtggaagaaggaacagcctcaggcagcgatggaaatttttctgaagatgtgctgtctaaatttgatgaatggacctttattcctgactcttctatggacagtgtgtttgctcaaagtgatgacctggatagtgaaggaagtgaaggctcatttcttgtgaaaaagaaatctaattcaattagtgtaggagaattttaccgagatgccgtattacagcgttgctcaccaaatttgcaaagacattccaattccttggggcccatttttgatcatgaagatttactgaagcgaaaaagaaaaatattatcttcagatgattcactcaggtcatcaaaacttcaatcccatatgaggcattcagacagcatttcttctctggcttctgagagagaatatattacatcactagacctttcagcaaatgaactaagagatattgatgccctaagccagaaatgctgtataagtgttcatttggagcatcttgaaaagctggagcttcaccagaatgcactcacgagctttccacaacagctatgtgaaactctgaagagtttgacacatttggacttgcacagtaataaatttacatcatttccttcttatttgttgaaaatgagttgtattgctaatcttgatgtctctcgaaatgacattggaccctcagtggttttagatcctacagtgaaatgtccaactctgaaacagtttaacctgtcatataaccagctgtcttttgtacctgagaacctcactgatgtggtagagaaactggagcagctcattttagaaggaaataaaatatcagggatatgctcccccttgagactgaaggaactgaagattttaaaccttagtaagaaccacatttcatccctatcagagaactttcttgaggcttgtcctaaagtggagagtttcagtgccagaatgaattttcttgctgctatgcctttcttgcctccttctatgacaatcctaaaattatctcagaacaaattttcctgtattccagaagcaattttaaatcttccacacttgcggtctttagatatgagcagcaatgatattcagtacctaccaggtcccgcacactggaaatctttgaacttaagggaactcttatttagccataatcagatcagcatcttggacttgagtgaaaaagcatatttatggtctagagtagagaaactgcatctttctcacaataaactgaaagagattcctcctgagattggctgtcttgaaaatctgacatctctggatgtcagttacaacttggaactaagatcctttcccaatgaaatggggaaattaagcaaaatatgggatcttcctttggatgaactgcatcttaactttgattttaaacatataggatgtaaagccaaagacatcataaggtttcttcaacagcgattaaaaaaggctgtgccttataaccgaatgaaacttatgattgtgggaaatactgggagtggtaaaaccaccttattgcagcaattaatgaaaaccaagaaatcagatcttggaatgcaaagtgccacagttggcatagatgtgaaagactggcctatccaaataagagacaaaagaaagagagatctcgtcctaaatgtgtgggattttgcaggtcgtgaggaattctatagtactcatccccattttatgacgcagcgagcattgtaccttgctgtctatgacctcagcaagggacaggctgaagttgatgccatgaagccttggctcttcaatataaaggctcgcgcttcttcttcccctgtgattctcgttggcacacatttggatgtttctgatgagaagcaacgcaaagcctgcatgagtaaaatcaccaaggaactcctgaataagcgagggttccctgccatacgagattaccactttgtgaatgccaccgaggaatctgatgctttggcaaaacttcggaaaaccatcataaacgagagccttaatttcaagatccgagatcagcttgttgttggacagctgattccagactgctatgtagaacttgaaaaaatcattttatcggagcgtaaaaatgtgccaattgaatttcccgtaattgaccggaaacgattattacaactagtgagagaaaatcagctgcagttagatgaaaatgagcttcctcacgcagttcactttctaaatgaatcaggagtccttcttcattttcaagacccagcactgcagttaagtgacttgtactttgtggaacccaagtggctttgtaaaatcatggcacagattttgacagtgaaagtggaaggttgtccaaaacaccctaagggcattatttcgcgtagagatgtggaaaaatttctttcaaaaaaaaggaaatttccaaagaactacatgtcacagtattttaagctcctagaaaaattccagattgctttgccaataggagaagaatatttgctggttccaagcagtttgtctgaccacaggcctgtgatagagcttccccattgtgagaactctgaaattatcatccgactatatgaaatgccttattttccaatgggattttggtcaagattaatcaatcgattacttgagatttcaccttacatgctttcagggagagaacgagcacttcgcccaaacagaatgtattggcgacaaggcatttacttaaattggtctcctgaagcttattgtctggtaggatctgaagtcttagacaatcatccagagagtttcttaaaaattacagttccttcttgtagaaaaggctgtattcttttgggccaagttgtggaccacattgattctctcatggaagaatggtttcctgggttgctggagattgatatttgtggtgaaggagaaactctgttgaagaaatgggcattatatagttttaatgatggtgaagaacatcaaaaaatcttacttgatgacttgatgaagaaagcagaggaaggagatctcttagtaaatccagatcaaccaaggctcaccattccaatatctcagattgcccctgacttgattttggctgacctgcctagaaatattatgttgaataatgatgagttggaatttgaacaagctccagagtttctcctaggtgatggcagttttggatcagtttaccgagcagcctatgaaggagaagaagtggctgtgaagatttttaataaacatacatcactcaggctgttaagacaagagcttgtggtgctttgccacctccaccaccccagtttgatatctttgctggcagctgggattcgtccccggatgttggtgatggagttagcctccaagggttccttggatcgcctgcttcagcaggacaaagccagcctcactagaaccctacagcacaggattgcactccacgtagctgatggtttgagatacctccactcagccatgattatataccgagacctgaaaccccacaatgtgctgcttttcacactgtatcccaatgctgccatcattgcaaagattgctgactacggcattgctcagtactgctgtagaatggggataaaaacatcagagggcacaccagggtttcgtgcacctgaagttgccagaggaaatgtcatttataaccaacaggctgatgtttattcatttggtttactactctatgacattttgacaactggaggtagaatagtagagggtttgaagtttccaaatgagtttgatgaattagaaatacaaggaaaattacctgatccagttaaagaatatggttgtgccccatggcctatggttgagaaattaattaaacagtgtttgaaagaaaatcctcaagaaaggcctacttctgcccaggtctttgacattttgaattcagctgaattagtctgtctgacgagacgcattttattacctaaaaacgtaattgttgaatgcatggttgctacacatcacaacagcaggaatgcaagcatttggctgggctgtgggcacaccgacagaggacagctctcatttcttgacttaaatactgaaggatacacttctgaggaagttgctgatagtagaatattgtgcttagccttggtgcatcttcctgttgaaaaggaaagctggattgtgtctgggacacagtctggtactctcctggtcatcaataccgaagatgggaaaaagagacataccctagaaaagatgactgattctgtcacttgtttgtattgcaattccttttccaagcaaagcaaacaaaaaaattttcttttggttggaaccgctgatggcaagttagcaatttttgaagataagactgttaagcttaaaggagctgctcctttgaagatactaaatataggaaatgtcagtactccattgatgtgtttgagtgaatccacaaattcaacggaaagaaatgtaatgtggggaggatgtggcacaaagattttctccttttctaatgatttcaccattcagaaactcattgagacaagaacaagccaactgttttcttatgcagctttcagtgattccaacatcataacagtggtggtagacactgctctctatattgctaagcaaaatagccctgttgtggaagtgtgggataagaaaactgaaaaactctgtggactaatagactgcgtgcactttttaagggaggtaatggtaaaagaaaacaaggaatcaaaacacaaaatgtcttattctgggagagtgaaaaccctctgccttcagaagaacactgctctttggataggaactggaggaggccatattttactcctggatctttcaactcgtcgacttatacgtgtaatttacaacttttgtaattcggtcagagtcatgatgacagcacagctaggaagccttaaaaatgtcatgctggtattgggctacaaccggaaaaatactgaagagatacaatcttgcttgaccgtttgggacatcaatcttccacatgaagtgcaaaatttagaaaaacacattgaagtgagaaaagaattagctgaaaaaatgagacgaacatctgttgagtaagagagaaataggaattgtctttggataggaaaattattctctcctcttgtaaatatttattttaaaaatgttcacatggaaagggtactcacattttttgaaatagctcgtgtgtatgaaggaatgttattatttttaatttaaatatatgtaaaaatacttaccagtaaatgtgtattttaaagaactatttaaaacacaatgttatatttcttataaataccagttactttcgttcattaattaatgaaaataaatctgtgaagtacctaatttaagtactcatactaaaatttataaggccgataattttttgttttcttgtctgtaatggaggtaaactttattttaaattctgtgcttaagacaggactattgcttgtcgatttttctagaaatctgcacggtataatgaaaatattaagacagtttcccatgtaatgtattccttcttagattgcatcgaaatgcactatcatatatgcttgtaaatattcaaatgaatttgcactaataaagtcctttgttggtatgtgaattctctttgttgctgttgcaaacagtgcatcttacacaacttcactcaattcaaaagaaaactccattaaaagtactaatgaaaaaacatgacatactgtcaaagtcctcatatctaggaaagacacagaaactctctttgtcacagaaactctctgtgtctttcctagacataatagagttgtttttcaactctatgtttgaatgtggataccctgaattttgtataattagtgtaaatacagtgttcagtccttcaagtgatatttttatttttttattcataccactagctacttgttttctaatctgcttcattctaatgcttatattcatcttttccctaaatttgtgatgctgcagatcctacatcattcagatagaaacctttttttttttcagaattatagaattccacagctcctaccaagaccatgaggataaatatctaacacttttcagttgctgaaggagaaaggagctttagttatgatggataaaaatatctgccaccctaggcttccaaattatacttaaattgtttacatagcttaccacaataggagtatcagggccaaatacctatgtaataatttgaggtcatttctgctttaggaaaagtactttcggtaaattctttggccctgaccagtattcattatttcagataattccctgtgataggacaactagtacatttaatattctcagaacttatggcattttactatgtgaaaactttaaatttatttatattaagggtaatcaaattcttaaagatgaaagattttctgtattttaaaggaagctatgctttaacttgttatgtaattaacaaaaaaatcatatataatagagctctttgttccagtgttatctctttcattgttactttgtatttgcaattttttttaccaaagacaaattaaaaaaatgaataccatatttaaatggaataataaaggttttttaaaaactttaaa

SEQ ID NO: 408 - DNA, 9167 bp, Homo sapiens
  source 1..9167: mol_type = genomic DNA
ggggcccgcggggagcgctggctgcgggcggtgagctgagctcgcccccggggagctgtggccggcgcccctgccggttccctgagcagcggacgttcatgctgggagggcggcgggttggaagcaggtgccaccatggctagtggcagctgtcaggggtgcgaagaggacgaggaaactctgaagaagttgatagtcaggctgaacaatgtccaggaaggaaaacagatagaaacgctggtccaaatcctggaggatctgctggtgttcacgtactccgagcgcgcctccaagttatttcaaggcaaaaatatccatgtgcctctgttgatcgtcttggactcctatatgagagtcgcgagtgtgcagcaggtgggttggtcacttctgtgcaaattaatagaagtctgtccaggtacaatgcaaagcttaatgggaccccaggatgttggaaatgattgggaagtccttggtgttcaccaattgattcttaaaatgctaacagttcataatgccagtgtaaacttgtcagtgattggactgaagaccttagatctcctcctaacttcaggtaaaatcaccttgctgatattggatgaagaaagtgatattttcatgttaatttttgatgccatgcactcatttccagccaatgatgaagtccagaaacttggatgcaaagctttacatgtgctgtttgagagagtctcagaggagcaactgactgaatttgttgagaacaaagattatatgatattgttaagtgcgttaacaaattttaaagatgaagaggaaattgtgcttcatgtgctgcattgtttacattccctagcgattccttgcaataatgtggaagtcctcatgagtggcaatgtcaggtgttataatattgtggtggaagctatgaaagcattccctatgagtgaaagaattcaagaagtgagttgctgtttgctccataggcttacattaggtaattttttcaatatcctggtattaaacgaagtccatgagtttgtggtgaaagctgtgcagcagtacccagagaatgcagcattgcagatctcagcgctcagctgtttggccctcctcactgagactattttcttaaatcaagatttagaggaaaagaatgagaatcaagagaatgatgatgagggggaagaagataaattgttttggctggaagcctgttacaaagcattaacgtggcatagaaagaacaagcacgtgcaggaggccgcatgctgggcactaaataatctccttatgtaccaaaacagtttacatgagaagattggagatgaagatggccatttcccagctcatagggaagtgatgctctccatgctgatgcattcttcatcaaaggaagttttccaggcatctgcgaatgcattgtcaactctcttagaacaaaatgttaatttcagaaaaatactgttatcaaaaggaatacacctgaatgttttggagttaatgcagaagcatatacattctcctgaagtggctgaaagtggctgtaaaatgctaaatcatctttttgaaggaagcaacacttccctggatataatggcagcagtggtccccaaaatactaacagttatgaaacgtcatgagacatcattaccagtgcagctggaggcgcttcgagctattttacattttatagtgcctggcatgccagaagaatccagggaggatacagaatttcatcataagctaaatatggttaaaaaacagtgtttcaagaatgatattcacaaactggtcctagcagctttgaacaggttcattggaaatcctgggattcagaaatgtggattaaaagtaatttcttctattgtacattttcctgatgcattagagatgttatccctggaaggtgctatggattcagtgcttcacacactgcagatgtatccagatgaccaagaaattcagtgtctgggtttaagtcttataggatacttgattacaaagaagaatgtgttcataggaactggacatctgctggcaaaaattctggtttccagcttataccgatttaaggatgttgctgaaatacagactaaaggatttcagacaatcttagcaatcctcaaattgtcagcatctttttctaagctgctggtgcatcattcatttgacttagtaatattccatcaaatgtcttccaatatcatggaacaaaaggatcaacagtttctaaacctctgttgcaagtgttttgcaaaagtagctatggatgattacttaaaaaatgtgatgctagagagagcgtgtgatcagaataacagcatcatggttgaatgcttgcttctattgggagcagatgccaatcaagcaaaggagggatcttctttaatttgtcaggtatgtgagaaagagagcagtcccaaattggtggaactcttactgaatagtggatctcgtgaacaagatgtacgaaaagcgttgacgataagcattgggaaaggtgacagccagatcatcagcttgctcttaaggaggctggccctggatgtggccaacaatagcatttgccttggaggattttgtataggaaaagttgaaccttcttggcttggtcctttatttccagataagacttctaatttaaggaaacaaacaaatatagcatctacactagcaagaatggtgatcagatatcagatgaaaagtgctgtggaagaaggaacagcctcaggcagcgatggaaatttttctgaagatgtgctgtctaaatttgatgaatggacctttattcctgactcttctatggacagtgtgtttgctcaaagtgatgacctggatagtgaaggaagtgaaggctcatttcttgtgaaaaagaaatctaattcaattagtgtaggagaattttaccgagatgccgtattacagcgttgctcaccaaatttgcaaagacattccaattccttggggcccatttttgatcatgaagatttactgaagcgaaaaagaaaaatattatcttcagatgattcactcaggtcatcaaaacttcaatcccatatgaggcattcagacagcatttcttctctggcttctgagagagaatatattacatcactagacctttcagcaaatgaactaagagatattgatgccctaagccagaaatgctgtataagtgttcatttggagcatcttgaaaagctggagcttcaccagaatgcactcacgagctttccacaacagctatgtgaaactctgaagagtttgacacatttggacttgcacagtaataaatttacatcatttccttcttatttgttgaaaatgagttgtattgctaatcttgatgtctctcgaaatgacattggaccctcagtggttttagatcctacagtgaaatgtccaactctgaaacagtttaacctgtcatataaccagctgtcttttgtacctgagaacctcactgatgtggtagagaaactggagcagctcattttagaaggaaataaaatatcagggatatgctcccccttgagactgaaggaactgaagattttaaaccttagtaagaaccacatttcatccctatcagagaactttcttgaggcttgtcctaaagtggagagtttcagtgccagaatgaattttcttgctgctatgcctttcttgcctccttctatgacaatcctaaaattatctcagaacaaattttcctgtattccagaagcaattttaaatcttccacacttgcggtctttagatatgagcagcaatgatattcagtacctaccaggtcccgcacactggaaatctttgaacttaagggaactcttatttagccataatcagatcagcatcttggacttgagtgaaaaagcatatttatggtctagagtagagaaactgcatctttctcacaataaactgaaagagattcctcctgagattggctgtcttgaaaatctgacatctctggatgtcagttacaacttggaactaagatcctttcccaatgaaatggggaaattaagcaaaatatgggatcttcctttggatgaactgcatcttaactttgattttaaacatataggatgtaaagccaaagacatcataaggtttcttcaacagcgattaaaaaaggctgtgccttataaccgaatgaaacttatgattgtgggaaatactgggagtggtaaaaccaccttattgcagcaattaatgaaaaccaagaaatcagatcttggaatgcaaagtgccacagttggcatagatgtgaaagactggcctatccaaataagagacaaaagaaagagagatctcgtcctaaatgtgtgggattttgcaggtcgtgaggaattctatagtactcatccccattttatgacgcagcgagcattgtaccttgctgtctatgacctcagcaagggacaggctgaagttgatgccatgaagccttggctcttcaatataaaggctcgcgcttcttcttcccctgtgattctcgttggcacacatttggatgtttctgatgagaagcaacgcaaagcctgcatgagtaaaatcaccaaggaactcctgaataagcgagggttccctgccatacgagattaccactttgtgaatgccaccgaggaatctgatgctttggcaaaacttcggaaaaccatcataaacgagagccttaatttcaagatccgagatcagcttgttgttggacagctgattccagactgctatgtagaacttgaaaaaatcattttatcggagcgtaaaaatgtgccaattgaatttcccgtaattgaccggaaacgattattacaactagtgagagaaaatcagctgcagttagatgaaaatgagcttcctcacgcagttcactttctaaatgaatcaggagtccttcttcattttcaagacccagcactgcagttaagtgacttgtactttgtggaacccaagtggctttgtaaaatcatggcacagattttgacagtgaaagtggaaggttgtccaaaacaccctaagggcattatttcgcgtagagatgtggaaaaatttctttcaaaaaaaaggaaatttccaaagaactacatgtcacagtattttaagctcctagaaaaattccagattgctttgccaataggagaagaatatttgctggttccaagcagtttgtctgaccacaggcctgtgatagagcttccccattgtgagaactctgaaattatcatccgactatatgaaatgccttattttccaatgggattttggtcaagattaatcaatcgattacttgagatttcaccttacatgctttcagggagagaacgagcacttcgcccaaacagaatgtattggcgacaaggcatttacttaaattggtctcctgaagcttattgtctggtaggatctgaagtcttagacaatcatccagagagtttcttaaaaattacagttccttcttgtagaaaaggctgtattcttttgggccaagttgtggaccacattgattctctcatggaagaatggtttcctgggttgctggagattgatatttgtggtgaaggagaaactctgttgaagaaatgggcattatatagttttaatgatggtgaagaacatcaaaaaatcttacttgatgacttgatgaagaaagcagaggaaggagatctcttagtaaatccagatcaaccaaggctcaccattccaatatctcagattgcccctgacttgattttggctgacctgcctagaaatattatgttgaataatgatgagttggaatttgaacaagctccagagtttctcctaggtgatggcagttttggatcagtttaccgagcagcctatgaaggagaagaagtggctgtgaagatttttaataaacatacatcactcaggctgttaagacaagagcttgtggtgctttgccacctccaccaccccagtttgatatctttgctggcagctgggattcgtccccggatgttggtgatggagttagcctccaagggttccttggatcgcctgcttcagcaggacaaagccagcctcactagaaccctacagcacaggattgcactccacgtagctgatggtttgagatacctccactcagccatgattatataccgagacctgaaaccccacaatgtgctgcttttcacactgtatcccaatgctgccatcattgcaaagattgctgactacggcattgctcagtactgctgtagaatggggataaaaacatcagagggcacaccagggtttcgtgcacctgaagttgccagaggaaatgtcatttataaccaacaggctgatgtttattcatttggtttactactctatgacattttgacaactggaggtagaatagtagagggtttgaagtttccaaatgagtttgatgaattagaaatacaaggaaaattacctgatccagttaaagaatatggttgtgccccatggcctatggttgagaaattaattaaacagtgtttgaaagaaaatcctcaagaaaggcctacttctgcccaggtctttgacattttgaattcagctgaattagtctgtctgacgagacgcattttattacctaaaaacgtaattgttgaatgcatggttgctacacatcacaacagcaggaatgcaagcatttggctgggctgtgggcacaccgacagaggacagctctcatttcttgacttaaatactgaaggatacacttctgaggaagttgctgatagtagaatattgtgcttagccttggtgcatcttcctgttgaaaaggaaagctggattgtgtctgggacacagtctggtactctcctggtcatcaataccgaagatgggaaaaagagacataccctagaaaagatgactgattctgtcacttgtttgtattgcaattccttttccaagcaaagcaaacaaaaaaattttcttttggttggaaccgctgatggcaagttagcaatttttgaagataagactgttaagcttaaaggagctgctcctttgaagatactaaatataggaaatgtcagtactccattgatgtgtttgagtgaatccacaaattcaacggaaagaaatgtaatgtggggaggatgtggcacaaagattttctccttttctaatgatttcaccattcagaaactcattgagacaagaacaagccaactgttttcttatgcagctttcagtgattccaacatcataacagtggtggtagacactgctctctatattgctaagcaaaatagccctgttgtggaagtgtgggataagaaaactgaaaaactctgtggactaatagactgcgtgcactttttaagggaggtaatggtaaaagaaaacaaggaatcaaaacacaaaatgtcttattctgggagagtgaaaaccctctgccttcagaagaacactgctctttggataggaactggaggaggccatattttactcctggatctttcaactcgtcgacttatacgtgtaatttacaacttttgtaattcggtcagagtcatgatgacagcacagctagagatacaatcttgcttgaccgtttgggacatcaatcttccacatgaagtgcaaaatttagaaaaacacattgaagtgagaaaagaattagctgaaaaaatgagacgaacatctgttgagtaagagagaaataggaattgtctttggataggaaaattattctctcctcttgtaaatatttattttaaaaatgttcacatggaaagggtactcacattttttgaaatagctcgtgtgtatgaaggaatgttattatttttaatttaaatatatgtaaaaatacttaccagtaaatgtgtattttaaagaactatttaaaacacaatgttatatttcttataaataccagttactttcgttcattaattaatgaaaataaatctgtgaagtacctaatttaagtactcatactaaaatttataaggccgataattttttgttttcttgtctgtaatggaggtaaactttattttaaattctgtgcttaagacaggactattgcttgtcgatttttctagaaatctgcacggtataatgaaaatattaagacagtttcccatgtaatgtattccttcttagattgcatcgaaatgcactatcatatatgcttgtaaatattcaaatgaatttgcactaataaagtcctttgttggtatgtgaattctctttgttgctgttgcaaacagtgcatcttacacaacttcactcaattcaaaagaaaactccattaaaagtactaatgaaaaaacatgacatactgtcaaagtcctcatatctaggaaagacacagaaactctctttgtcacagaaactctctgtgtctttcctagacataatagagttgtttttcaactctatgtttgaatgtggataccctgaattttgtataattagtgtaaatacagtgttcagtccttcaagtgatatttttatttttttattcataccactagctacttgttttctaatctgcttcattctaatgcttatattcatcttttccctaaatttgtgatgctgcagatcctacatcattcagatagaaacctttttttttttcagaattatagaattccacagctcctaccaagaccatgaggataaatatctaacacttttcagttgctgaaggagaaaggagctttagttatgatggataaaaatatctgccaccctaggcttccaaattatacttaaattgtttacatagcttaccacaataggagtatcagggccaaatacctatgtaataatttgaggtcatttctgctttaggaaaagtactttcggtaaattctttggccctgaccagtattcattatttcagataattccctgtgataggacaactagtacatttaatattctcagaacttatggcattttactatgtgaaaactttaaatttatttatattaagggtaatcaaattcttaaagatgaaagattttctgtattttaaaggaagctatgctttaacttgttatgtaattaacaaaaaaatcatatataatagagctctttgttccagtgttatctctttcattgttactttgtatttgcaattttttttaccaaagacaaattaaaaaaatgaataccatatttaaatggaataataaaggttttttaaaaactttaaa

SEQ ID NO: 409 - DNA, 10778 bp, Homo sapiens
  source 1..10778: mol_type = genomic DNA
ggggcccgcggggagcgctggctgcgggcggtgagctgagctcgcccccggggagctgtggccggcgcccctgccggttccctgagcagcggacgttcatgctgggagggcggcgggttggaagcaggtgccaccatggctagtggcagctgtcaggggtgcgaagaggacgaggaaactctgaagaagttgatagtcaggctgaacaatgtccaggaaggaaaacagatagaaacgctggtccaaatcctggaggatctgctggtgttcacgtactccgagcgcgcctccaagttatttcaaggcaaaaatatccatgtgcctctgttgatcgtcttggactcctatatgagagtcgcgagtgtgcagcaggtgggttggtcacttctgtgcaaattaatagaagtctgtccaggtacaatgcaaagcttaatgggaccccaggatgttggaaatgattgggaagtccttggtgttcaccaattgattcttaaaatgctaacagttcataatgccagtgtaaacttgtcagtgattggactgaagaccttagatctcctcctaacttcaggtaaaatcaccttgctgatattggatgaagaaagtgatattttcatgttaatttttgatgccatgcactcatttccagccaatgatgaagtccagaaacttggatgcaaagctttacatgtgctgtttgagagagtctcagaggagcaactgactgaatttgttgagaacaaagattatatgatattgttaagtgcgttaacaaattttaaagatgaagaggaaattgtgcttcatgtgctgcattgtttacattccctagcgattccttgcaataatgtggaagtcctcatgagtggcaatgtcaggtgttataatattgtggtggaagctatgaaagcattccctatgagtgaaagaattcaagaagtgagttgctgtttgctccataggcttacattaggtaattttttcaatatcctggtattaaacgaagtccatgagtttgtggtgaaagctgtgcagcagtacccagagaatgcagcattgcagatctcagcgctcagctgtttggccctcctcactgagactattttcttaaatcaagatttagaggaaaagaatgagaatcaagagaatgatgatgagggggaagaagataaattgttttggctggaagcctgttacaaagcattaacgtggcatagaaagaacaagcacgtgcaggaggccgcatgctgggcactaaataatctccttatgtaccaaaacagtttacatgagaagattggagatgaagatggccatttcccagctcatagggaagtgatgctctccatgctgatgcattcttcatcaaaggaagttttccaggcatctgcgaatgcattgtcaactctcttagaacaaaatgttaatttcagaaaaatactgttatcaaaaggaatacacctgaatgttttggagttaatgcagaagcatatacattctcctgaagtggctgaaagtggctgtaaaatgctaaatcatctttttgaaggaagcaacacttccctggatataatggcagcagtggtccccaaaatactaacagttatgaaacgtcatgagacatcattaccagtgcagctggaggcgcttcgagctattttacattttatagtgcctggcatgccagaagaatccagggaggatacagaatttcatcataagctaaatatggttaaaaaacagtgtttcaagaatgatattcacaaactggtcctagcagctttgaacaggttcattggaaatcctgggattcagaaatgtggattaaaagtaatttcttctattgtacattttcctgatgcattagagatgttatccctggaaggtgctatggattcagtgcttcacacactgcagatgtatccagatgaccaagaaattcagtgtctgggtttaagtcttataggatacttgattacaaagaagaatgtgttcataggaactggacatctgctggcaaaaattctggtttccagcttataccgatttaaggatgttgctgaaatacagactaaaggatttcagacaatcttagcaatcctcaaattgtcagcatctttttctaagctgctggtgcatcattcatttgacttagtaatattccatcaaatgtcttccaatatcatggaacaaaaggatcaacagtttctaaacctctgttgcaagtgttttgcaaaagtagctatggatgattacttaaaaaatgtgatgctagagagagcgtgtgatcagaataacagcatcatggttgaatgcttgcttctattgggagcagatgccaatcaagcaaaggagggatcttctttaatttgtcaggtatgtgagaaagagagcagtcccaaattggtggaactcttactgaatagtggatctcgtgaacaagatgtacgaaaagcgttgacgataagcattgggaaaggtgacagccagatcatcagcttgctcttaaggaggctggccctggatgtggccaacaatagcatttgccttggaggattttgtataggaaaagttgaaccttcttggcttggtcctttatttccagataagacttctaatttaaggaaacaaacaaatatagcatctacactagcaagaatggtgatcagatatcagatgaaaagtgctgtggaagaaggaacagcctcaggcagcgatggaaatttttctgaagatgtgctgtctaaatttgatgaatggacctttattcctgactcttctatggacagtgtgtttgctcaaagtgatgacctggatagtgaaggaagtgaaggctcatttcttgtgaaaaagaaatctaattcaattagtgtaggagaattttaccgagatgccgtattacagcgttgctcaccaaatttgcaaagacattccaattccttggggcccatttttgatcatgaagatttactgaagcgaaaaagaaaaatattatcttcagatgattcactcaggtcatcaaaacttcaatcccatatgaggcattcagacagcatttcttctctggcttctgagagagaatatattacatcactagacctttcagcaaatgaactaagagatattgatgccctaagccagaaatgctgtataagtgttcatttggagcatcttgaaaagctggagcttcaccagaatgcactcacgagctttccacaacagctatgtgaaactctgaagagtttgacacatttggacttgcacagtaataaatttacatcatttccttcttatttgttgaaaatgagttgtattgctaatcttgatgtctctcgaaatgacattggaccctcagtggttttagatcctacagtgaaatgtccaactctgaaacagtttaacctgtcatataaccagctgtcttttgtacctgagaacctcactgatgtggtagagaaactggagcagctcattttagaaggaaataaaatatcagggatatgctcccccttgagactgaaggaactgaagattttaaaccttagtaagaaccacatttcatccctatcagagaactttcttgaggcttgtcctaaagtggagagtttcagtgccagaatgaattttcttgctgctatgcctttcttgcctccttctatgacaatcctaaaattatctcagaacaaattttcctgtattccagaagcaattttaaatcttccacacttgcggtctttagatatgagcagcaatgatattcagtacctaccaggtcccgcacactggaaatctttgaacttaagggaactcttatttagccataatcagatcagcatcttggacttgagtgaaaaagcatatttatggtctagagtagagaaactgcatctttctcacaataaactgaaagagattcctcctgagattggctgtcttgaaaatctgacatctctggatgtcagttacaacttggaactaagatcctttcccaatgaaatggggaaattaagcaaaatatgggatcttcctttggatgaactgcatcttaactttgattttaaacatataggatgtaaagccaaagacatcataaggtttcttcaacagcgattaaaaaaggctgtgccttataaccgaatgaaacttatgattgtgggaaatactgggagtggtaaaaccaccttattgcagcaattaatgaaaaccaagaaatcagatcttggaatgcaaagtgccacagttggcatagatgtgaaagactggcctatccaaataagagacaaaagaaagagagatctcgtcctaaatgtgtgggattttgcaggtcgtgaggaattctatagtactcatccccattttatgacgcagcgagcattgtaccttgctgtctatgacctcagcaagggacaggctgaagttgatgccatgaagccttggctcttcaatataaaggctcgcgcttcttcttcccctgtgattctcgttggcacacatttggatgtttctgatgagaagcaacgcaaagcctgcatgagtaaaatcaccaaggaactcctgaataagcgagggttccctgccatacgagattaccactttgtgaatgccaccgaggaatctgatgctttggcaaaacttcggaaaaccatcataaacgagagccttaatttcaagatccgagatcagcttgttgttggacagctgattccagactgctatgtagaacttgaaaaaatcattttatcggagcgtaaaaatgtgccaattgaatttcccgtaattgaccggaaacgattattacaactagtgagagaaaatcagctgcagttagatgaaaatgagcttcctcacgcagttcactttctaaatgaatcaggagtccttcttcattttcaagacccagcactgcagttaagtgacttgtactttgtggaacccaagtggctttgtaaaatcatggcacagattttgacagtgaaagtggaaggttgtccaaaacaccctaagggcattatttcgcgtagagatgtggaaaaatttctttcaaaaaaaaggaaatttccaaagaactacatgtcacagtattttaagctcctagaaaaattccagattgctttgccaataggagaagaatatttgctggttccaagcagtttgtctgaccacaggcctgtgatagagcttccccattgtgagaactctgaaattatcatccgactatatgaaatgccttattttccaatgggattttggtcaagattaatcaatcgattacttgagatttcaccttacatgctttcagggagagaacgagcacttcgcccaaacagaatgtattggcgacaaggcatttacttaaattggtctcctgaagcttattgtctggtaggatctgaagtcttagacaatcatccagagagtttcttaaaaattacagttccttcttgtagaaaaggctgtattcttttgggccaagttgtggaccacattgattctctcatggaagaatggtttcctgggttgctggagattgatatttgtggtgaaggagaaactctgttgaagaaatgggcattatatagttttaatgatggtgaagaacatcaaaaaatcttacttgatgacttgatgaagaaagcagaggaaggagatctcttagtaaatccagatcaaccaaggctcaccattccaatatctcagattgcccctgacttgattttggctgacctgcctagaaatattatgttgaataatgatgagttggaatttgaacaagctccagagtttctcctaggtgatggcagttttggatcagtttaccgagcagcctatgaaggagaagaagtggctgtgaagatttttaataaacatacatcactcaggctgttaagacaagagcttgtggtgctttgccacctccaccaccccagtttgatatctttgctggcagctgggattcgtccccggatgttggtgatggagttagcctccaagggttccttggatcgcctgcttcagcaggacaaagccagcctcactagaaccctacagcacaggattgcactccacgtagctgatggtttgagatacctccactcagccatgattatataccgagacctgaaaccccacaatgtgctgcttttcacactgtatcccaatgctgccatcattgcaaagattgctgactacggcattgctcagtactgctgtagaatggggataaaaacatcagagggcacaccagggtttcgtgcacctgaagttgccagaggaaatgtcatttataaccaacaggctgatgtttattcatttggtttactactctatgacattttgacaactggaggtagaatagtagagggtttgaagtttccaaatgagtttgatgaattagaaatacaaggaaaattacctgatccagttaaagaatatggttgtgccccatggcctatggttgagaaattaattaaacagtgtttgaaagaaaatcctcaagaaaggcctacttctgcccaggtctttgacattttgaattcagctgaattagtctgtctgacgagacgcattttattacctaaaaacgtaattgttgaatgcatggttgctacacatcacaacagcaggaatgcaagcatttggctgggctgtgggcacaccgacagaggacagctctcatttcttgacttaaatactgaaggatacacttctgaggaagttgctgatagtagaatattgtgcttagccttggtgcatcttcctgttgaaaaggaaagctggattgtgtctgggacacagtctggtactctcctggtcatcaataccgaagatgggaaaaagagacataccctagaaaagatgactgattctgtcacttgtttgtattgcaattccttttccaagcaaagcaaacaaaaaaattttcttttggttggaaccgctgatggcaagttagcaatttttgaagataagactgttaagcttaaaggagctgctcctttgaagatactaaatataggaaatgtcagtactccattgatgtgtttgagtgaatccacaaattcaacggaaagaaatgtaatgtggggaggatgtggcacaaagattttctccttttctaatgatttcaccattcagaaactcattgagacaagaacaagccaactgttttcttatgcagctttcagtgattccaacatcataacagtggtggtagacactgctctctatattgctaagcaaaatagccctgttgtggaagtgtgggataagaaaactgaaaaactctgtggactaatagactgcgtgcactttttaagggaggtaatggtaaaagaaaacaaggaatcaaaacacaaaatgtcttattctgggagagtgaaaaccctctgccttcagaagaacactgctctttggataggaactggaggaggccatattttactcctggatctttcaactcgtcgacttatacgtgtaatttacaacttttgtaattcggtcagagtcatgatgacagcacagctaggcaagtttctttcctttagatatttttcatattctctaagtcttataaaatatgcctttattttacgtttacattttctctgaactttccagtgtcatatggatggtcttggagggtcacacagtgaaacataagactggtataaattgtgaatagggtcattacagaagtggagggagtaaatgctctcagtcccacaagagaagcagattactgcagctgaacactcagtttgggtcttacttgcttttttcctttttacctaaggcaaaaatgggaaatacatggtattgaatatattttactttttgagcaaagaaaataaagaaaatgtttgttttaatcatagtctagcctcccagcttgttaaagaatctcatttggtttttcattctataacaaatcttttttcttgcagcaatacatgctgaactgcacaacctacaaatattgacaaatcatattttactcaaactttgtctttttttgcttctatttttatatttaaatatgataaaattgtgatagcacataaaatatattttctgcataaatatatttgcgtcttcctttgataataatttgttttagaaaataacaataatagcatatatacaaaagtttacaaaaacgacactatggggtttaattctgaaaaaaactagaatttatgtaactttagcaaataatgaatgttttgaacatggtgaagaaaatatattcattgcaagtatatgtgaaagaggaacatgtgtttttctagcaccttcacctatttttcatttatagactttagagttgcacaggagttacaattagatgctcttaatgactgtaaactattaagatacatgtccacacaagcagagcagtaggtctctcaataggttgtctcagtagtcttattctaccaaagttgttgcattctctagttgaattgtatgtactttgggacccaaatagcttgcttataactgaagttatagtggaatgtctatgggttatagtttgattttaaaataaagatcaattggaggatagcctacaaggtgctgcatgagctggcttcactgtacctctcctgcctccatcatctaccacattcctaccagatcttgcttgtctagatgaacatccagttcttctcaattactatgctatattttgcctcagggatttgcacatgctgtttatttctttgcttagttaacatagctttttttcatgcttatttaactcatatgctttgaaatgttagctcctgtgtcaaaacctctgagaagccaacactgattaggtcaaagttcccgctttgggttcccataacagctttcttgcatagttttgatcatggtcatatttttttttcattaatgctagtctcttcactagaatataaactccaagacggttgggttagtgtgtttttgtttaccccttttttcccaggatctagcctagggcctacatagaagacttttgatgcaaatttgttgaataaattagtgaatgatttgaaaagaaaatatgatattttgacatagtatcagtatatccatccatctaagtgtccatctaaatactcatatttgtactaaatactcatatttgtaccttaccatatccaaagaacttttcacacacattacctcgtttaacattgtaactttgggaagggtaatgtataaatactgagcctattttatagaaaggttaagctgttttctcagactcacataattaagaattgcagcaaggagtggatcacagattttgttattttttaaaaaaatgctggtctttattcaatataattgaagggtcacctagaaaatagaattgtgaattcagttccaaggtatttgtgtcttaaactatgaacaactttacttttttttcaggccagtttaatatatagttttaacagaaaacttacatattttgtttttgtaaaggaagccttaaaaatgtcatgctggtattgggctacaaccggaaaaatactgaaggtacacaaaagcagaaaggtaacatttagaaggatactgttttccaaacagggcaatgatgtgaatgatggtaacatattatgtgtttcataaatttgtagaaaatattacatatggtataatcaggaattttaattggtagtttatagtgtaaagaacttagacataaattttcaaaattacaagtgatatgaagtgttaaatatttatattttcagctgaagtagaggtgtcaatcactagctcaaccttaaacgaaatgtgaatattttttacaacttatctatatctacataatgtctaattttgaacagtgtttgaaaaagcttttatttcttttagaatatgaaatgttaatttattaaatgttgatactctatttgaaatttaatagtttctataatgtattataaaacttttccaagtatagttttttataaataataatttagtacattagttatagctgtgtttatatttacatttatctaagtcaactaaaaatacatgagccaaactgaaataaaataagaatgttttatgatggatctttgaaacatgatttcatttttttctttttctagagatacaatcttgcttgaccgtttgggacatcaatcttccacatgaagtgcaaaatttagaaaaacacattgaagtgagaaaagaattagctgaaaaaatgagacgaacatctgttgagtaagagagaaataggaattgtctttggataggaaaattattctctcctcttgtaaatatttattttaaaaatgttcacatggaaagggtactcacattttttgaaatagctcgtgtgtatgaaggaatgttattatttttaatttaaatatatgtaaaaatacttaccagtaaatgtgtattttaaagaactatttaaaacacaatgttatatttcttataaataccagttactttcgttcattaattaatgaaaataaatctgtgaagtacctaatttaagtactcatactaaaatttataaggccgataattttttgttttcttgtctgtaatggaggtaaactttattttaaattctgtgcttaagacaggactattgcttgtcgatttttctagaaatctgcacggtataatgaaaatattaagacagtttcccatgtaatgtattccttcttagattgcatcgaaatgcactatcatatatgcttgtaaatattcaaatgaatttgcactaataaagtcctttgttggtatgtgaa

SEQ ID NO: 410 - DNA, 10600 bp, Homo sapiens
  source 1..10600: mol_type = genomic DNA
ggggcccgcggggagcgctggctgcgggcggtgagctgagctcgcccccggggagctgtggccggcgcccctgccggttccctgagcagcggacgttcatgctgggagggcggcgggttggaagcaggtgccaccatggctagtggcagctgtcaggggtgcgaagaggacgaggaaactctgaagaagttgatagtcaggctgaacaatgtccaggaaggaaaacagatagaaacgctggtccaaatcctggaggatctgctggtgttcacgtactccgagcgcgcctccaagttatttcaaggcaaaaatatccatgtgcctctgttgatcgtcttggactcctatatgagagtcgcgagtgtgcagcaggtgggttggtcacttctgtgcaaattaatagaagtctgtccaggtacaatgcaaagcttaatgggaccccaggatgttggaaatgattgggaagtccttggtgttcaccaattgattcttaaaatgctaacagttcataatgccagtgtaaacttgtcagtgattggactgaagaccttagatctcctcctaacttcaggtaaaatcaccttgctgatattggatgaagaaagtgatattttcatgttaatttttgatgccatgcactcatttccagccaatgatgaagtccagaaacttggatgcaaagctttacatgtgctgtttgagagagtctcagaggagcaactgactgaatttgttgagaacaaagattatatgatattgttaagtgcgttaacaaattttaaagatgaagaggaaattgtgcttcatgtgctgcattgtttacattccctagcgattccttgcaataatgtggaagtcctcatgagtggcaatgtcaggtgttataatattgtggtggaagctatgaaagcattccctatgagtgaaagaattcaagaagtgagttgctgtttgctccataggcttacattaggtaattttttcaatatcctggtattaaacgaagtccatgagtttgtggtgaaagctgtgcagcagtacccagagaatgcagcattgcagatctcagcgctcagctgtttggccctcctcactgagactattttcttaaatcaagatttagaggaaaagaatgagaatcaagagaatgatgatgagggggaagaagataaattgttttggctggaagcctgttacaaagcattaacgtggcatagaaagaacaagcacgtgcaggaggccgcatgctgggcactaaataatctccttatgtaccaaaacagtttacatgagaagattggagatgaagatggccatttcccagctcatagggaagtgatgctctccatgctgatgcattcttcatcaaaggaagttttccaggcatctgcgaatgcattgtcaactctcttagaacaaaatgttaatttcagaaaaatactgttatcaaaaggaatacacctgaatgttttggagttaatgcagaagcatatacattctcctgaagtggctgaaagtggctgtaaaatgctaaatcatctttttgaaggaagcaacacttccctggatataatggcagcagtggtccccaaaatactaacagttatgaaacgtcatgagacatcattaccagtgcagctggaggcgcttcgagctattttacattttatagtgcctggcatgccagaagaatccagggaggatacagaatttcatcataagctaaatatggttaaaaaacagtgtttcaagaatgatattcacaaactggtcctagcagctttgaacaggttcattggaaatcctgggattcagaaatgtggattaaaagtaatttcttctattgtacattttcctgatgcattagagatgttatccctggaaggtgctatggattcagtgcttcacacactgcagatgtatccagatgaccaagaaattcagtgtctgggtttaagtcttataggatacttgattacaaagaagaatgtgttcataggaactggacatctgctggcaaaaattctggtttccagcttataccgatttaaggatgttgctgaaatacagactaaaggatttcagacaatcttagcaatcctcaaattgtcagcatctttttctaagctgctggtgcatcattcatttgacttagtaatattccatcaaatgtcttccaatatcatggaacaaaaggatcaacagtttctaaacctctgttgcaagtgttttgcaaaagtagctatggatgattacttaaaaaatgtgatgctagagagagcgtgtgatcagaataacagcatcatggttgaatgcttgcttctattgggagcagatgccaatcaagcaaaggagggatcttctttaatttgtcaggtatgtgagaaagagagcagtcccaaattggtggaactcttactgaatagtggatctcgtgaacaagatgtacgaaaagcgttgacgataagcattgggaaaggtgacagccagatcatcagcttgctcttaaggaggctggccctggatgtggccaacaatagcatttgccttggaggattttgtataggaaaagttgaaccttcttggcttggtcctttatttccagataagacttctaatttaaggaaacaaacaaatatagcatctacactagcaagaatggtgatcagatatcagatgaaaagtgctgtggaagaaggaacagcctcaggcagcgatggaaatttttctgaagatgtgctgtctaaatttgatgaatggacctttattcctgactcttctatggacagtgtgtttgctcaaagtgatgacctggatagtgaaggaagtgaaggctcatttcttgtgaaaaagaaatctaattcaattagtgtaggagaattttaccgagatgccgtattacagcgttgctcaccaaatttgcaaagacattccaattccttggggcccatttttgatcatgaagatttactgaagcgaaaaagaaaaatattatcttcagatgattcactcaggtcatcaaaacttcaatcccatatgaggcattcagacagcatttcttctctggcttctgagagagaatatattacatcactagacctttcagcaaatgaactaagagatattgatgccctaagccagaaatgctgtataagtgttcatttggagcatcttgaaaagctggagcttcaccagaatgcactcacgagctttccacaacagctatgtgaaactctgaagagtttgacacatttggacttgcacagtaataaatttacatcatttccttcttatttgttgaaaatgagttgtattgctaatcttgatgtctctcgaaatgacattggaccctcagtggttttagatcctacagtgaaatgtccaactctgaaacagtttaacctgtcatataaccagctgtcttttgtacctgagaacctcactgatgtggtagagaaactggagcagctcattttagaaggaaataaaatatcagggatatgctcccccttgagactgaaggaactgaagattttaaaccttagtaagaaccacatttcatccctatcagagaactttcttgaggcttgtcctaaagtggagagtttcagtgccagaatgaattttcttgctgctatgcctttcttgcctccttctatgacaatcctaaaattatctcagaacaaattttcctgtattccagaagcaattttaaatcttccacacttgcggtctttagatatgagcagcaatgatattcagtacctaccaggtcccgcacactggaaatctttgaacttaagggaactcttatttagccataatcagatcagcatcttggacttgagtgaaaaagcatatttatggtctagagtagagaaactgcatctttctcacaataaactgaaagagattcctcctgagattggctgtcttgaaaatctgacatctctggatgtcagttacaacttggaactaagatcctttcccaatgaaatggggaaattaagcaaaatatgggatcttcctttggatgaactgcatcttaactttgattttaaacatataggatgtaaagccaaagacatcataaggtttcttcaacagcgattaaaaaaggctgtgccttataaccgaatgaaacttatgattgtgggaaatactgggagtggtaaaaccaccttattgcagcaattaatgaaaaccaagaaatcagatcttggaatgcaaagtgccacagttggcatagatgtgaaagactggcctatccaaataagagacaaaagaaagagagatctcgtcctaaatgtgtgggattttgcaggtcgtgaggaattctatagtactcatccccattttatgacgcagcgagcattgtaccttgctgtctatgacctcagcaagggacaggctgaagttgatgccatgaagccttggctcttcaatataaaggctcgcgcttcttcttcccctgtgattctcgttggcacacatttggatgtttctgatgagaagcaacgcaaagcctgcatgagtaaaatcaccaaggaactcctgaataagcgagggttccctgccatacgagattaccactttgtgaatgccaccgaggaatctgatgctttggcaaaacttcggaaaaccatcataaacgagagccttaatttcaagatccgagatcagcttgttgttggacagctgattccagactgctatgtagaacttgaaaaaatcattttatcggagcgtaaaaatgtgccaattgaatttcccgtaattgaccggaaacgattattacaactagtgagagaaaatcagctgcagttagatgaaaatgagcttcctcacgcagttcactttctaaatgaatcaggagtccttcttcattttcaagacccagcactgcagttaagtgacttgtactttgtggaacccaagtggctttgtaaaatcatggcacagattttgacagtgaaagtggaaggttgtccaaaacaccctaagggcattatttcgcgtagagatgtggaaaaatttctttcaaaaaaaaggaaatttccaaagaactacatgtcacagtattttaagctcctagaaaaattccagattgctttgccaataggagaagaatatttgctggttccaagcagtttgtctgaccacaggcctgtgatagagcttccccattgtgagaactctgaaattatcatccgactatatgaaatgccttattttccaatgggattttggtcaagattaatcaatcgattacttgagatttcaccttacatgctttcagggagagaacgagcacttcgcccaaacagaatgtattggcgacaaggcatttacttaaattggtctcctgaagcttattgtctggtaggatctgaagtcttagacaatcatccagagagtttcttaaaaattacagttccttcttgtagaaaaggctgtattcttttgggccaagttgtggaccacattgattctctcatggaagaatggtttcctgggttgctggagattgatatttgtggtgaaggagaaactctgttgaagaaatgggcattatatagttttaatgatggtgaagaacatcaaaaaatcttacttgatgacttgatgaagaaagcagaggaaggagatctcttagtaaatccagatcaaccaaggctcaccattccaatatctcagattgcccctgacttgattttggctgacctgcctagaaatattatgttgaataatgatgagttggaatttgaacaagctccagagtttctcctaggtgatggcagttttggatcagtttaccgagcagcctatgaaggagaagaagtggctgtgaagatttttaataaacatacatcactcaggctgttaagacaagagcttgtggtgctttgccacctccaccaccccagtttgatatctttgctggcagctgggattcgtccccggatgttggtgatggagttagcctccaagggttccttggatcgcctgcttcagcaggacaaagccagcctcactagaaccctacagcacaggattgcactccacgtagctgatggtttgagatacctccactcagccatgattatataccgagacctgaaaccccacaatgtgctgcttttcacactgtatcccaatgctgccatcattgcaaagattgctgactacggcattgctcagtactgctgtagaatggggataaaaacatcagagggcacaccagggtttcgtgcacctgaagttgccagaggaaatgtcatttataaccaacaggctgatgtttattcatttggtttactactctatgacattttgacaactggaggtagaatagtagagggtttgaagtttccaaatgagtttgatgaattagaaatacaaggaaaattacctgatccagttaaagaatatggttgtgccccatggcctatggttgagaaattaattaaacagtgtttgaaagaaaatcctcaagaaaggcctacttctgcccaggtctttgacattttgaattcagctgaattagtctgtctgacgagacgcattttattacctaaaaacgtaattgttgaatgcatggttgctacacatcacaacagcaggaatgcaagcatttggctgggctgtgggcacaccgacagaggacagctctcatttcttgacttaaatactgaaggatacacttctgaggaagttgctgatagtagaatattgtgcttagccttggtgcatcttcctgttgaaaaggaaagctggattgtgtctgggacacagtctggtactctcctggtcatcaataccgaagatgggaaaaagagacataccctagaaaagatgactgattctgtcacttgtttgtattgcaattccttttccaagcaaagcaaacaaaaaaattttcttttggttggaaccgctgatggcaagttagcaatttttgaagataagactgttaagcttaaaggagctgctcctttgaagatactaaatataggaaatgtcagtactccattgatgtgtttgagtgaatccacaaattcaacggaaagaaatgtaatgtggggaggatgtggcacaaagattttctccttttctaatgatttcaccattcagaaactcattgagacaagaacaagccaactacatgaaattggaagacaatcaactttgtatttcaccaaattcacggactatacatatgcaatttgggtaacttccattaagtattgattgtaggaaagatagacagcaagtattcttgcttgtccaaagttgtttctagatttgataattatacagatgtctactcacagccaagttagtgataccagtttcaaacaagaataaaataaaatattaatataaacctctttcaagtttgctttttttcagtggtattttaatcaaatctttgcagttggttcttatttatcacattcctcagtgataagcagtataggattgtggataagagcataaatcatagttcagatattgctttgccatctattggttttgtgaacttgggcaataacctttcacatcttcagtcatctcttacctgaggattgtaatattctctatctcaaagagatatttggaggagtaaataagaatgttaatatatggatcttaattaacataatgaccagcacctggtaagctgtcaataaacattagctattattattattattagctttgagtcacaaatccctaccttagggaatatcctggtttcccattatccatcaaatttcccaagattggcacttgggagtaatctttgactcctttgttttttgctccctttatccacttgaccctcctaattgtcatttgaatctttgtacttctcactgttctcagtgctggtaccatgggccagactgccatccattatctgtggccacattaacaagagcatccagttctcaccctctgattatactctcttcaacatattttcagcattgcagacagagggacctttctaaaatgtacatcaatctgatgcaattttcctgcttaaaacccttcagtggtatcccattgtcctttatatgaagtccaaattccttaagacagcctactgggcccttcataattcagtgcttgcttacctgtctagattcatattttgcaagctttttgccatctgtgctttacccaaactgaaattgactcagatctctaagacaacctgttattacctttcacccccaacctttgaatgtggtcttctccttacctggatgactattatgccccctgcctatttcagtccaagcaccacttgctctgagtggcaggttaggtgactttgtgcttccattgcatctaatgttttccttcacagtagctataattgtatttgttaaagtagtttctcaataccactaaatctactggctttcaacattggctgtgcatttagaaaccactaggtagctgaaaataatatgatacctgggccctacctcagaccaattaaatcagaccagttaagcctgggatggggatcagattttttttttcaggttctcaagtgattctaaagtatatttgaggttaagatatactgcggagtgcagtgtattataagttcccatgaatgaggatttttatttctgtctttacatatttatttactagtatgtggttaacatttggatcaactcattctcattctgtaatacccacattttaaaaaatgaatgtaaaaatgtcttttattatttttatttttcaaatttaattttagattccaggaatacatgtgcaggtttgttacaaaagtatagtgcgtgatgctgaggtttggaatacaactgaactcacaacccagaaagtgggcatagtgcttgataggtagtttttcatctttgctccccttcctgtaatttccacttttaacccaattatacaagcctgaaaacctttaaaaagaaagggcctccagtttatttttttatttcatagcacattttatgggattatggatatcagttaactctttaaagttccatataagatttggagcatagatgctttactagagagcatccataaagatcaagctctcaaagatgctcatctcccaaaagagattgggacctagatgcataaacacttaaatataaatatttgctctcttctgaacaagtatctcctgtggccttggtctctaccccacaaaacagacatcacatcactaatcaggggttgcctcatcatcagtaccctcatcatcatcagtacacaccgactgagaggcatgttgggtaatgaaagatgactgcctttgaagccggaagactccataggacttttggagttctaggtctgcaacatgtttttagtcctaggtcggcaagcatgatgttagtcataggaccttgagcaaattatttagcatttgtacatgtttctttctactattaaaaacattgagatttatcatattttatgtttttttattaaggatcaagcaagataacacacaaaagtattttataaaatacggaaattccatgcaaaactttgtcctaattggaactattttctattaaatacagcaaatatccaagaaggaattacctaaagcgtagtggctctctgacaacacatcatatttttacctccttttccagaatagaaagaaaagggggaggaaaaaaaatcttcctactctaggatatactaatgattgttaaatctttatggtattttcatgttatctatctgatttaaatgcaattttgactatttttacatattcctcgttgttcattcatactgtagtgccttcttctattcccccacttaacagactgcttgattatatcagaggtgcttatctgtgcaactgtttactggacgaggggtatgtagaaaatacattgtcctcatccttatgaaattacactcataatctagtgtgagggatgcactaataaagacaattttatatttaataaggtctataatatgacagtgacaccagtggggaaaagggactggttggtctattttgataggtcagggaagaaatccagaggagccgacatttaagttcatcctcaaaggccaagtaggagtttgccatgctgatgtggcccaaggtagccaatctgtttgtgaaatatgtacaatgccagatgtcttaggttgaaagggaaatattttaaggtgttcgtaatttttctttatgtttaaaaggggaaaatggcaaatattttactttctgtttatgtttggatgatgtggatttttgttttctataatttgactggcttaactgcaaagatatcccttgctttaaaatttgaagacactgcaactaaattttatttcagcattttatattttataactctaggtataaaaggctaacacttaattttctgagcattcatgaaacaaagttttgcaagaacattcaaaagttacagatataatatttccttcagaaatttagatatagtacaaaattctacaaagagccacatagaattgaaactaaaagtaagaccaaagtaaacattggacataatctttattttattatcacaagaaa

SEQ ID NO: 411 - DNA, 5117 bp, Homo sapiens
  source 1..5117: mol_type = genomic DNA
ggggcccgcggggagcgctggctgcgggcggtgagctgagctcgcccccggggagctgtggccggcgcccctgccggttccctgagcagcggacgttcatgctgggagggcggcgggttggaagcaggtgccaccatggctagtggcagctgtcaggggtgcgaagaggacgaggaaactctgaagaagttgatagtcaggctgaacaatgtccaggaaggaaaacagatagaaacgctggtccaaatcctggaggatctgctggtgttcacgtactccgagcgcgcctccaagttatttcaaggcaaaaatatccatgtgcctctgttgatcgtcttggactcctatatgagagtcgcgagtgtgcagcaggtgggttggtcacttctgtgcaaattaatagaagtctgtccaggtacaatgcaaagcttaatgggaccccaggatgttggaaatgattgggaagtccttggtgttcaccaattgattcttaaaatgctaacagttcataatgccagtgtaaacttgtcagtgattggactgaagaccttagatctcctcctaacttcaggtaaaatcaccttgctgatattggatgaagaaagtgatattttcatgttaatttttgatgccatgcactcatttccagccaatgatgaagtccagaaacttggatgcaaagctttacatgtgctgtttgagagagtctcagaggagcaactgactgaatttgttgagaacaaagattatatgatattgttaagtgcgttaacaaattttaaagatgaagaggaaattgtgcttcatgtgctgcattgtttacattccctagcgattccttgcaataatgtggaagtcctcatgagtggcaatgtcaggtgttataatattgtggtggaagctatgaaagcattccctatgagtgaaagaattcaagaagtgagttgctgtttgctccataggcttacattaggtaattttttcaatatcctggtattaaacgaagtccatgagtttgtggtgaaagctgtgcagcagtacccagagaatgcagcattgcagatctcagcgctcagctgtttggccctcctcactgagactattttcttaaatcaagatttagaggaaaagaatgagaatcaagagaatgatgatgagggggaagaagataaattgttttggctggaagcctgttacaaagcattaacgtggcatagaaagaacaagcacgtgcaggaggccgcatgctgggcactaaataatctccttatgtaccaaaacagtttacatgagaagattggagatgaagatggccatttcccagctcatagggaagtgatgctctccatgctgatgcattcttcatcaaaggaagttttccaggcatctgcgaatgcattgtcaactctcttagaacaaaatgttaatttcagaaaaatactgttatcaaaaggaatacacctgaatgttttggagttaatgcagaagcatatacattctcctgaagtggctgaaagtggctgtaaaatgctaaatcatctttttgaaggaagcaacacttccctggatataatggcagcagtggtccccaaaatactaacagttatgaaacgtcatgagacatcattaccagtgcagctggaggcgcttcgagctattttacattttatagtgcctggcatgccagaagaatccagggaggatacagaatttcatcataagctaaatatggttaaaaaacagtgtttcaagaatgatattcacaaactggtcctagcagctttgaacaggttcattggaaatcctgggattcagaaatgtggattaaaagtaatttcttctattgtacattttcctgatgcattagagatgttatccctggaaggtgctatggattcagtgcttcacacactgcagatgtatccagatgaccaagaaattcagtgtctgggtttaagtcttataggatacttgattacaaagaagaatgtgttcataggaactggacatctgctggcaaaaattctggtttccagcttataccgatttaaggatgttgctgaaatacagactaaaggatttcagacaatcttagcaatcctcaaattgtcagcatctttttctaagctgctggtgcatcattcatttgacttagtaatattccatcaaatgtcttccaatatcatggaacaaaaggatcaacagtttctaaacctctgttgcaagtgttttgcaaaagtagctatggatgattacttaaaaaatgtgatgctagagagagcgtgtgatcagaataacagcatcatggttgaatgcttgcttctattgggagcagatgccaatcaagcaaaggagggatcttctttaatttgtcaggtatgtgagaaagagagcagtcccaaattggtggaactcttactgaatagtggatctcgtgaacaagatgtacgaaaagcgttgacgataagcattgggaaaggtgacagccagatcatcagcttgctcttaaggaggctggccctggatgtggccaacaatagcatttgccttggaggattttgtataggaaaagttgaaccttcttggcttggtcctttatttccagataagacttctaatttaaggaaacaaacaaatatagcatctacactagcaagaatggtgatcagatatcagatgaaaagtgctgtggaagaaggaacagcctcaggcagcgatggaaatttttctgaagatgtgctgtctaaatttgatgaatggacctttattcctgactcttctatggacagtgtgtttgctcaaagtgatgacctggatagtgaaggaagtgaaggctcatttcttgtgaaaaagaaatctaattcaattagtgtaggagaattttaccgagatgccgtattacagcgttgctcaccaaatttgcaaagacattccaattccttggggcccatttttgatcatgaagatttactgaagcgaaaaagaaaaatattatcttcagatgattcactcaggtcatcaaaacttcaatcccatatgaggcattcagacagcatttcttctctggcttctgagagagaatatattacatcactagacctttcagcaaatgaactaagagatattgatgccctaagccagaaatgctgtataagtgttcatttggagcatcttgaaaagctggagcttcaccagaatgcactcacgagctttccacaacagctatgtgaaactctgaagagtttgacacatttggacttgcacagtaataaatttacatcatttccttcttatttgttgaaaatgagttgtattgctaatcttgatgtctctcgaaatgacattggaccctcagtggttttagatcctacagtgaaatgtccaactctgaaacagtttaacctgtcatataaccagctgtcttttgtacctgagaacctcactgatgtggtagagaaactggagcagctcattttagaaggaaataaaatatcagggatatgctcccccttgagactgaaggaactgaagattttaaaccttagtaagaaccacatttcatccctatcagagaactttcttgaggcttgtcctaaagtggagagtttcagtgccagaatgaattttcttgctgctatgcctttcttgcctccttctatgacaatcctaaaattatctcagaacaaattttcctgtattccagaagcaattttaaatcttccacacttgcggtctttagatatgagcagcaatgatattcagtacctaccaggtcccgcacactggaaatctttgaacttaagggaactcttatttagccataatcagatcagcatcttggacttgagtgaaaaagcatatttatggtctagagtagagaaactgcatctttctcacaataaactgaaagagattcctcctgagattggctgtcttgaaaatctgacatctctggatgtcagttacaacttggaactaagatcctttcccaatgaaatggggaaattaagcaaaatatgggatcttcctttggatgaactgcatcttaactttgattttaaacatataggatgtaaagccaaagacatcataaggtttcttcaacagcgattaaaaaaggctgtgccttataaccgaatgaaacttatgattgtgggaaatactgggagtggtaaaaccaccttattgcagcaattaatgaaaaccaagaaatcagatcttggaatgcaaagtgccacagttggcatagatgtgaaagactggcctatccaaataagagacaaaagaaagagagatctcgtcctaaatgtgtgggattttgcaggtcgtgaggaattctatagtactcatccccattttatgacgcagcgagcattgtaccttgctgtctatgacctcagcaagggacaggctgaagttgatgccatgaagccttggctcttcaatataaaggctcgcgcttcttcttcccctgtgattctcgttggcacacatttggatgtttctgatgagaagcaacgcaaagcctgcatgagtaaaatcaccaaggaactcctgaataagcgagggttccctgccatacgagattaccactttgtgaatgccaccgaggaatctgatgctttggcaaaacttcggaaaaccatcataaacgagagccttaatttcaagatccgagatcagcttgttgttggacagctgattccagactgctatgtagaacttgaaaaaatcattttatcggagcgtaaaaatgtgccaattgaatttcccgtaattgaccggaaacgattattacaactagtgagagaaaatcagctgcagttagatgaaaatgagcttcctcacgcagttcactttctaaatgaatcaggagtccttcttcattttcaagacccagcactgcagttaagtgacttgtactttgtggaacccaagtggctttgtaaaatcatggcacagtttgtctgaccacaggcctgtgatagagcttccccattgtgagaactctgaaattatcatccgactatatgaaatgccttattttccaatgggattttggtcaagattaatcaatcgattacttgagatttcaccttacatgctttcagggagag

SEQ ID NO: 412 - DNA, 8660 bp, Homo sapiens
  source 1..8660: mol_type = genomic DNA
ggggcccgcggggagcgctggctgcgggcggtgagctgagctcgcccccggggagctgtggccggcgcccctgccggttccctgagcagcggacgttcatgctgggagggcggcgggttggaagcaggtgccaccatggctagtggcagctgtcaggggtgcgaagaggacgaggaaactctgaagaagttgatagtcaggctgaacaatgtccaggaaggaaaacagatagaaacgctggtccaaatcctggaggatctgctggtgttcacgtactccgagcgcgcctccaagttatttcaaggcaaaaatatccatgtgcctctgttgatcgtcttggactcctatatgagagtcgcgagtgtgcagcaggtgggttggtcacttctgtgcaaattaatagaagtctgtccaggtacaatgcaaagcttaatgggaccccaggatgttggaaatgattgggaagtccttggtgttcaccaattgattcttaaaatgctaacagttcataatgccagtgtaaacttgtcagtgattggactgaagaccttagatctcctcctaacttcaggtaaaatcaccttgctgatattggatgaagaaagtgatattttcatgttaatttttgatgccatgcactcatttccagccaatgatgaagtccagaaacttggatgcaaagctttacatgtgctgtttgagagagtctcagaggagcaactgactgaatttgttgagaacaaagattatatgatattgttaagtgcgttaacaaattttaaagatgaagaggaaattgtgcttcatgtgctgcattgtttacattccctagcgattccttgcaataatgtggaagtcctcatgagtggcaatgtcaggtgttataatattgtggtggaagctatgaaagcattccctatgagtgaaagaattcaagaagtgagttgctgtttgctccataggcttacattaggtaattttttcaatatcctggtattaaacgaagtccatgagtttgtggtgaaagctgtgcagcagtacccagagaatgcagcattgcagatctcagcgctcagctgtttggccctcctcactgagactattttcttaaatcaagatttagaggaaaagaatgagaatcaagagaatgatgatgagggggaagaagataaattgttttggctggaagcctgttacaaagcattaacgtggcatagaaagaacaagcacgtgcaggaggccgcatgctgggcactaaataatctccttatgtaccaaaacagtttacatgagaagattggagatgaagatggccatttcccagctcatagggaagtgatgctctccatgctgatgcattcttcatcaaaggaagttttccaggcatctgcgaatgcattgtcaactctcttagaacaaaatgttaatttcagaaaaatactgttatcaaaaggaatacacctgaatgttttggagttaatgcagaagcatatacattctcctgaagtggctgaaagtggctgtaaaatgctaaatcatctttttgaaggaagcaacacttccctggatataatggcagcagtggtccccaaaatactaacagttatgaaacgtcatgagacatcattaccagtgcagctggaggcgcttcgagctattttacattttatagtgcctggcatgccagaagaatccagggaggatacagaatttcatcataagctaaatatggttaaaaaacagtgtttcaagaatgatattcacaaactggtcctagcagctttgaacaggttcattggaaatcctgggattcagaaatgtggattaaaagtaatttcttctattgtacattttcctgatgcattagagatgttatccctggaaggtgctatggattcagtgcttcacacactgcagatgtatccagatgaccaagaaattcagtgtctgggtttaagtcttataggatacttgattacaaagaagaatgtgttcataggaactggacatctgctggcaaaaattctggtttccagcttataccgatttaaggatgttgctgaaatacagactaaaggatttcagacaatcttagcaatcctcaaattgtcagcatctttttctaagctgctggtgcatcattcatttgacttagtaatattccatcaaatgtcttccaatatcatggaacaaaaggatcaacagtttctaaacctctgttgcaagtgttttgcaaaagtagctatggatgattacttaaaaaatgtgatgctagagagagcgtgtgatcagaataacagcatcatggttgaatgcttgcttctattgggagcagatgccaatcaagcaaaggagggatcttctttaatttgtcaggtatgtgagaaagagagcagtcccaaattggtggaactcttactgaatagtggatctcgtgaacaagatgtacgaaaagcgttgacgataagcattgggaaaggtgacagccagatcatcagcttgctcttaaggaggctggccctggatgtggccaacaatagcatttgccttggaggattttgtataggaaaagttgaaccttcttggcttggtcctttatttccagataagacttctaatttaaggaaacaaacaaatatagcatctacactagcaagaatggtgatcagatatcagatgaaaagtgctgtggaagaaggaacagcctcaggcagcgatggaaatttttctgaagatgtgctgtctaaatttgatgaatggacctttattcctgactcttctatggacagtgtgtttgctcaaagtgatgacctggatagtgaaggaagtgaaggctcatttcttgtgaaaaagaaatctaattcaattagtgtaggagaattttaccgagatgccgtattacagcgttgctcaccaaatttgcaaagacattccaattccttggggcccatttttgatcatgaagatttactgaagcgaaaaagaaaaatattatcttcagatgattcactcaggtcatcaaaacttcaatcccatatgaggcattcagacagcatttcttctctggcttctgagagagaatatattacatcactagacctttcagcaaatgaactaagagatattgatgccctaagccagaaatgctgtataagtgttcatttggagcatcttgaaaagctggagcttcaccagaatgcactcacgagctttccacaacagctatgtgaaactctgaagagtttgacacatttggacttgcacagtaataaatttacatcatttccttcttatttgttgaaaatgagttgtattgctaatcttgatgtctctcgaaatgacattggaccctcagtggttttagatcctacagtgaaatgtccaactctgaaacagtttaacctgtcatataaccagctgtcttttgtacctgagaacctcactgatgtggtagagaaactggagcagctcattttagaaggaaataaaatatcagggatatgctcccccttgagactgaaggaactgaagattttaaaccttagtaagaaccacatttcatccctatcagagaactttcttgaggcttgtcctaaagtggagagtttcagtgccagaatgaattttcttgctgctatgcctttcttgcctccttctatgacaatcctaaaattatctcagaacaaattttcctgtattccagaagcaattttaaatcttccacacttgcggtctttagatatgagcagcaatgatattcagtacctaccaggtcccgcacactggaaatctttgaacttaagggaactcttatttagccataatcagatcagcatcttggacttgagtgaaaaagcatatttatggtctagagtagagaaactgcatctttctcacaataaactgaaagagattcctcctgagattggctgtcttgaaaatctgacatctctggatgtcagttacaacttggaactaagatcctttcccaatgaaatggggaaattaagcaaaatatgggatcttcctttggatgaactgcatcttaactttgattttaaacatataggatgtaaagccaaagacatcataaggtttcttcaacagcgattaaaaaaggctgtgccttataaccgaatgaaacttatgattgtgggaaatactgggagtggtaaaaccaccttattgcagcaattaatgaaaaccaagaaatcagatcttggaatgcaaagtgccacagttggcatagatgtgaaagactggcctatccaaataagagacaaaagaaagagagatctcgtcctaaatgtgtgggattttgcaggtcgtgaggaattctatagtactcatccccattttatgacgcagcgagcattgtaccttgctgtctatgacctcagcaagggacaggctgaagttgatgccatgaagccttggctcttcaatataaaggctcgcgcttcttcttcccctgtgattctcgttggcacacatttggatgtttctgatgagaagcaacgcaaagcctgcatgagtaaaatcaccaaggaactcctgaataagcgagggttccctgccatacgagattaccactttgtgaatgccaccgaggaatctgatgctttggcaaaacttcggaaaaccatcataaacgagagccttaatttcaagatccgagatcagcttgttgttggacagctgattccagactgctatgtagaacttgaaaaaatcattttatcggagcgtaaaaatgtgccaattgaatttcccgtaattgaccggaaacgattattacaactagtgagagaaaatcagctgcagttagatgaaaatgagcttcctcacgcagttcactttctaaatgaatcaggagtccttcttcattttcaagacccagcactgcagttaagtgacttgtactttgtggaacccaagtggctttgtaaaatcatggcacaggaaaaaaaggaagctattgtgaagagagaactcagttgaggctaaatcctgtaccatggaactcaagagcatattgaaacattgcaatcagcaattatttgcagtgtgtcagttattactattttggtaggtatttttaaattagattttcagccttctgcacatatgtcatggataatgtgattttactcaattattaaatgataatggagacagtagtgtgacccagagcacttacttgagcatcagcttgacctacgtttcagtctctttaattacttattagctctgtgaaatttcttaatgcattaagcctttgtttacttactttttaaataaggaaaataacaattatcttctatattgcctccctggttcagtgtaagtgaggggtaaatgttagctaattttatattggatctatttggcaatttaaagaatgttaatcaggaaattttaaaaaattcagaactataaagaggtacttacgtagttttggaaagtgtgtcatgtatggggacaaataaaaaagatgtgtaggtagctgcatcctgtacagcaaaggaagttttaaatatatccagcaattttgttgtcctagctggcgcacaatagttatcaggaggtaactcaactccacatagtcaaggaaaagctaaagttgctctctaaagtggtgtgtttccatgtcactatggaacacttgaagttgcacacatgtgaacattaggatgggtatatcttatacagtagaataaggaagaggtttgcatcagaactccccttttaaaaaaatgcagattttcactatgactgcaataaaattcctgaagattctgtggagtaattaagttgaaactccatgaaagttcttctcattagcatagttataaatatgataatttaagtaaaaattaagttaatttgagccactcaaagttacttttaaagacagatttaaaatgtcaataaaatgataatttaaatttccgattaacctaaaaaagaagtgccatcatttttatttatgccaataaattgaaatataatgtcattttatcactaaggtttaaaggaaatgaaatctctaaataatcaagtgaaaccaagagcaacttgtctgacagctattagcaaaaataaataggagtattcaccttcatgaatcaaggcaagggccggaataatttcatggtgcagaagctctaatgagcccacccactctatgcgccccgagctgttaggtcactaaacttattaaaaaaaggtaccattaaggcagggagaagtttacaagactcatttaactgtatgataaaagagatatgaaagagacctattcaattaatcaggtggaacattaaaaagcttacatggcaatttaaccttgataaaaatacatgggagaaatacaaaggaatttggaaaattctctttccttgaataaggcatcagttagctattcaggttatgaggttgaaggaatgttaggagctcttttaaaggtgataaagtcaagataatgttgcagattttattcttatgtaacaaaccccctcgaaacttggaggcttaaaatgtgaacaatttatcatttctcgttcttctgtggcttgactgggctcagctgcgtggttctgctccacatggtattggcaagggttattcacttggcttcattcattaaactgagctggaaagtgcaagaaaggtacatgcatgtttttggagtattggtgcttctccatgtggcctatcatatggctaagttgggcttcctcgtggcacggtgatcacagaataattagacatctttcatggtggctggttaccaagagaaatgaagcagattttttctgtcctcttaaaggctaggccaaggactggcaaaaatattaattctgctacattctagtaaccagagcaaccacaaacctagctcagattaaaggggaaggaaaagagactctatatgaatagcacctatgtatagggatggaaatgatgtgtccatctttggaaacttccactataaatagtggtagcacgctatagatccactaggaaaatcaagcacaaactctttaaaaaataagtgtatcttagtaaaatagattagaataactagataataatggctaacatacatgaggttaatatgtgcttttcaaagattagctcatgtaattctcacagcaacctttccaaatggtactttattagcccctatgatacagatgaagaaattgattgacagagaggttgaataatttatccaacggtacacattcaggaagaggtagagttagaatttcaaaccaagtagtttgactccagggcctatgagtttatacattcatagggctgatattcaaatgagagaagagaagtaataaataaacatataatatgttgagtggtacagagtgctacaaagaaaatatgaagtgcagttggagatgaattgtcaaaaaaggtcttagcacttaaaaaacactaaaacagcaaacaattctctttaccacctaaactgtaagagcgatctggaattgctataaagtacacaacatgggagaagtcttaaacaacagtttttattatttataggcccattgcacactgtcattaaataccaatatgttcaatcaaccatgcattcattgattcaataaatactgtacatacaaaatagaaatacagaaatgggtaagacaagtccttgggcctaaggactttataacctggtatttcactcaactacatgatagcataaataatgtttgcttctgtttaagtattccttaaacattatagatctcccaaagaaaattaaatacaaacctctttttaaagtgaatttgacaaagcaaaataaattggaatatatagataaatatgctaaaatttgtcatatgtactttgcgtactttacatgtgttatttcattctcagggcaatctaagacagtcacttttattatctcattttatagagaagaaagctgtgcagtaaagaaatcaaatacctttcccaaggttacagagctagtagtagagcctggatttgaatctgggttctgactgatttttaactgccatgacaaggatcaaagctcaaagtgtgatctctgtgttagaaacatcggggttgctctttaaaaaagccgattctcaggcctcaacccagacctactgacccagacactgcaagtagaatccatcaaaatgcagtagttactttgagaatcatgaaactctgctacacagtctgtcttcctattcatggaagtcctctcctagtatataaatgtgaagtaatatttctatttcaaacctgtattgataactgtctggaagataattttcctgggaatatattattgatgagactgcaaaacagatgtgaggtattggattgatctttccattgtagctagggaaatactgatgttcattgtttcagtgaagttcaatgatttcctatccgaattaactcccttaatttaacaattttttttttttttttgagagtgaatgcccctctgggcttctaggccacatggttgctagagaaattaggtactgtgttgcacttgaaaacactaaaatctttctgactactttcactgagcaaagagacataaaatgctttaaatttgcaacatttcagaaaataaattttagtgattatttatgact

SEQ ID NO: 413 - DNA, 4761 bp, Homo sapiens
  source 1..4761: mol_type = genomic DNA
ggggcccgcggggagcgctggctgcgggcggtgagctgagctcgcccccggggagctgtggccggcgcccctgccggttccctgagcagcggacgttcatgctgggagggcggcgggttggaagcaggtgccaccatggctagtggcagctgtcaggggtgcgaagaggacgaggaaactctgaagaagttgatagtcaggctgaacaatgtccaggaaggaaaacagatagaaacgctggtccaaatcctggaggatctgctggtgttcacgtactccgagcgcgcctccaagttatttcaaggcaaaaatatccatgtgcctctgttgatcgtcttggactcctatatgagagtcgcgagtgtgcagcaggtgggttggtcacttctgtgcaaattaatagaagtctgtccaggtacaatgcaaagcttaatgggaccccaggatgttggaaatgattgggaagtccttggtgttcaccaattgattcttaaaatgctaacagttcataatgccagtgtaaacttgtcagtgattggactgaagaccttagatctcctcctaacttcaggtaaaatcaccttgctgatattggatgaagaaagtgatattttcatgttaatttttgatgccatgcactcatttccagccaatgatgaagtccagaaacttggatgcaaagctttacatgtgctgtttgagagagtctcagaggagcaactgactgaatttgttgagaacaaagattatatgatattgttaagtgcgttaacaaattttaaagatgaagaggaaattgtgcttcatgtgctgcattgtttacattccctagcgattccttgcaataatgtggaagtcctcatgagtggcaatgtcaggtgttataatattgtggtggaagctatgaaagcattccctatgagtgaaagaattcaagaagtgagttgctgtttgctccataggcttacattaggtaattttttcaatatcctggtattaaacgaagtccatgagtttgtggtgaaagctgtgcagcagtacccagagaatgcagcattgcagatctcagcgctcagctgtttggccctcctcactgagactattttcttaaatcaagatttagaggaaaagaatgagaatcaagagaatgatgatgagggggaagaagataaattgttttggctggaagcctgttacaaagcattaacgtggcatagaaagaacaagcacgtgcaggaggccgcatgctgggcactaaataatctccttatgtaccaaaacagtttacatgagaagattggagatgaagatggccatttcccagctcatagggaagtgatgctctccatgctgatgcattcttcatcaaaggaagttttccaggcatctgcgaatgcattgtcaactctcttagaacaaaatgttaatttcagaaaaatactgttatcaaaaggaatacacctgaatgttttggagttaatgcagaagcatatacattctcctgaagtggctgaaagtggctgtaaaatgctaaatcatctttttgaaggaagcaacacttccctggatataatggcagcagtggtccccaaaatactaacagttatgaaacgtcatgagacatcattaccagtgcagctggaggcgcttcgagctattttacattttatagtgcctggcatgccagaagaatccagggaggatacagaatttcatcataagctaaatatggttaaaaaacagtgtttcaagaatgatattcacaaactggtcctagcagctttgaacaggttcattggaaatcctgggattcagaaatgtggattaaaagtaatttcttctattgtacattttcctgatgcattagagatgttatccctggaaggtgctatggattcagtgcttcacacactgcagatgtatccagatgaccaagaaattcagtgtctgggtttaagtcttataggatacttgattacaaagaagaatgtgttcataggaactggacatctgctggcaaaaattctggtttccagcttataccgatttaaggatgttgctgaaatacagactaaaggatttcagacaatcttagcaatcctcaaattgtcagcatctttttctaagctgctggtgcatcattcatttgacttagtaatattccatcaaatgtcttccaatatcatggaacaaaaggatcaacagtttctaaacctctgttgcaagtgttttgcaaaagtagctatggatgattacttaaaaaatgtgatgctagagagagcgtgtgatcagaataacagcatcatggttgaatgcttgcttctattgggagcagatgccaatcaagcaaaggagggatcttctttaatttgtcaggtatgtgagaaagagagcagtcccaaattggtggaactcttactgaatagtggatctcgtgaacaagatgtacgaaaagcgttgacgataagcattgggaaaggtgacagccagatcatcagcttgctcttaaggaggctggccctggatgtggccaacaatagcatttgccttggaggattttgtataggaaaagttgaaccttcttggcttggtcctttatttccagataagacttctaatttaaggaaacaaacaaatatagcatctacactagcaagaatggtgatcagatatcagatgaaaagtgctgtggaagaaggaacagcctcaggcagcgatggaaatttttctgaagatgtgctgtctaaatttgatgaatggacctttattcctgactcttctatggacagtgtgtttgctcaaagtgatgacctggatagtgaaggaagtgaaggctcatttcttgtgaaaaagaaatctaattcaattagtgtaggagaattttaccgagatgccgtattacagcgttgctcaccaaatttgcaaagacattccaattccttggggcccatttttgatcatgaagatttactgaagcgaaaaagaaaaatattatcttcagatgattcactcaggtcatcaaaacttcaatcccatatgaggcattcagacagcatttcttctctggcttctgagagagaatatattacatcactagacctttcagcaaatgaactaagagatattgatgccctaagccagaaatgctgtataagtgttcatttggagcatcttgaaaagctggagcttcaccagaatgcactcacgagctttccacaacagctatgtgaaactctgaagagtttgacacatttggacttgcacagtaataaatttacatcatttccttcttatttgttgaaaatgagttgtattgctaatcttgatgtctctcgaaatgacattggaccctcagtggttttagatcctacagtgaaatgtccaactctgaaacagtttaacctgtcatataaccagctgtcttttgtacctgagaacctcactgatgtggtagagaaactggagcagctcattttagaaggaaataaaatatcagggatatgctcccccttgagactgaaggaactgaagattttaaaccttagtaagaaccacatttcatccctatcagagaactttcttgaggcttgtcctaaagtggagagtttcagtgccagaatgaattttcttgctgctatgcctttcttgcctccttctatgacaatcctaaaattatctcagaacaaattttcctgtattccagaagcaattttaaatcttccacacttgcggtctttagatatgagcagcaatgatattcagtacctaccaggtcccgcacactggaaatctttgaacttaagggaactcttatttagccataatcagatcagcatcttggacttgagtgaaaaagcatatttatggtctagagtagagaaactgcatctttctcacaataaactgaaagagattcctcctgagattggctgtcttgaaaatctgacatctctggatgtcagttacaacttggaactaagatcctttcccaatgaaatggggaaattaagcaaaatatgggatcttcctttggatgaactgcatcttaactttgattttaaacatataggatgtaaagccaaagacatcataaggtttcttcaacagcgattaaaaaaggctgtgccttataaccgaatgaaacttatgattgtgggaaatactgggagtggtaaaaccaccttattgcagcaattaatgaaaaccaagaaatcagatcttggaatgcaaagtgccacagttggcatagatgtgaaagactggcctatccaaataagagacaaaagaaagagagatctcgtcctaaatgtgtgggattttgcaggtcgtgaggaattctatagtactcatccccattttatgacgcagcgagcattgtaccttgctgtctatgacctcagcaagggacaggctgaagttgatgccatgaagccttggctcttcaatataaaggctcgcgcttcttcttcccctgtgattctcgttggcacacatttggatgtttctgatgagaagcaacgcaaagcctgcatgagtaaaatcaccaaggaactcctgaataagcgagggttccctgccatacgagattaccactttgtgaatgccaccgaggaatctgatgctttggcaaaacttcggaaaaccatcataaacgagagccttaatttcaaggagtccttcttcattttcaagacccagcactgcagttaagtgacttgtactttgtggaacccaagtggctttgtaaaatcatggcacagg

SEQ ID NO: 414 - DNA, 4107 bp, Homo sapiens
  source 1..4107: mol_type = genomic DNA
ggggcccgcggggagcgctggctgcgggcggtgagctgagctcgcccccggggagctgtggccggcgcccctgccggttccctgagcagcggacgttcatgctgggagggcggcgggttggaagcaggtgccaccatggctagtggcagctgtcaggggtgcgaagaggacgaggaaactctgaagaagttgatagtcaggctgaacaatgtccaggaaggaaaacagatagaaacgctggtccaaatcctggaggatctgctggtgttcacgtactccgagcgcgcctccaagttatttcaaggcaaaaatatccatgtgcctctgttgatcgtcttggactcctatatgagagtcgcgagtgtgcagcaggtgggttggtcacttctgtgcaaattaatagaagtctgtccaggtacaatgcaaagcttaatgggaccccaggatgttggaaatgattgggaagtccttggtgttcaccaattgattcttaaaatgctaacagttcataatgccagtgtaaacttgtcagtgattggactgaagaccttagatctcctcctaacttcaggtaaaatcaccttgctgatattggatgaagaaagtgatattttcatgttaatttttgatgccatgcactcatttccagccaatgatgaagtccagaaacttggatgcaaagctttacatgtgctgtttgagagagtctcagaggagcaactgactgaatttgttgagaacaaagattatatgatattgttaagtgcgttaacaaattttaaagatgaagaggaaattgtgcttcatgtgctgcattgtttacattccctagcgattccttgcaataatgtggaagtcctcatgagtggcaatgtcaggtgttataatattgtggtggaagctatgaaagcattccctatgagtgaaagaattcaagaagtgagttgctgtttgctccataggcttacattaggtaattttttcaatatcctggtattaaacgaagtccatgagtttgtggtgaaagctgtgcagcagtacccagagaatgcagcattgcagatctcagcgctcagctgtttggccctcctcactgagactattttcttaaatcaagatttagaggaaaagaatgagaatcaagagaatgatgatgagggggaagaagataaattgttttggctggaagcctgttacaaagcattaacgtggcatagaaagaacaagcacgtgcaggaggccgcatgctgggcactaaataatctccttatgtaccaaaacagtttacatgagaagattggagatgaagatggccatttcccagctcatagggaagtgatgctctccatgctgatgcattcttcatcaaaggaagttttccaggcatctgcgaatgcattgtcaactctcttagaacaaaatgttaatttcagaaaaatactgttatcaaaaggaatacacctgaatgttttggagttaatgcagaagcatatacattctcctgaagtggctgaaagtggctgtaaaatgctaaatcatctttttgaaggaagcaacacttccctggatataatggcagcagtggtccccaaaatactaacagttatgaaacgtcatgagacatcattaccagtgcagctggaggcgcttcgagctattttacattttatagtgcctggcatgccagaagaatccagggaggatacagaatttcatcataagctaaatatggttaaaaaacagtgtttcaagaatgatattcacaaactggtcctagcagctttgaacaggttcattggaaatcctgggattcagaaatgtggattaaaagtaatttcttctattgtacattttcctgatgcattagagatgttatccctggaaggtgctatggattcagtgcttcacacactgcagatgtatccagatgaccaagaaattcagtgtctgggtttaagtcttataggatacttgattacaaagaagaatgtgttcataggaactggacatctgctggcaaaaattctggtttccagcttataccgatttaaggatgttgctgaaatacagactaaaggatttcagacaatcttagcaatcctcaaattgtcagcatctttttctaagctgctggtgcatcattcatttgacttagtaatattccatcaaatgtcttccaatatcatggaacaaaaggatcaacagtttctaaacctctgttgcaagtgttttgcaaaagtagctatggatgattacttaaaaaatgtgatgctagagagagcgtgtgatcagaataacagcatcatggttgaatgcttgcttctattgggagcagatgccaatcaagcaaaggagggatcttctttaatttgtcaggtatgtgagaaagagagcagtcccaaattggtggaactcttactgaatagtggatctcgtgaacaagatgtacgaaaagcgttgacgataagcattgggaaaggtgacagccagatcatcagcttgctcttaaggaggctggccctggatgtggccaacaatagcatttgccttggaggattttgtataggaaaagttgaaccttcttggcttggtcctttatttccagataagacttctaatttaaggaaacaaacaaatatagcatctacactagcaagaatggtgatcagatatcagatgaaaagtgctgtggaagaaggaacagcctcaggcagcgatggaaatttttctgaagatgtgctgtctaaatttgatgaatggacctttattcctgactcttctatggacagtgtgtttgctcaaagtgatgacctggatagtgaaggaagtgaaggctcatttcttgtgaaaaagaaatctaattcaattagtgtaggagaattttaccgagatgccgtattacagcgttgctcaccaaatttgcaaagacattccaattccttggggcccatttttgatcatgaagatttactgaagcgaaaaagaaaaatattatcttcagatgattcactcaggtcatcaaaacttcaatcccatatgaggcattcagacagcatttcttctctggcttctgagagagaatatattacatcactagacctttcagcaaatgaactaagagatattgatgccctaagccagaaatgctgtataagtgttcatttggagcatcttgaaaagctggagcttcaccagaatgcactcacgagctttccacaacagctatgtgaaactctgaagagtttgacacatttggacttgcacagtaataaatttacatcatttccttcttatttgttgaaaatgagttgtattgctaatcttgatgtctctcgaaatgacattggaccctcagtggttttagatcctacagtgaaatgtccaactctgaaacagtttaacctgtcatataaccagctgtcttttgtacctgagaacctcactgatgtggtagagaaactggagcagctcattttagaaggaaataaaatatcagggatatgctcccccttgagactgaaggaactgaagattttaaaccttagtaagaaccacatttcatccctatcagagaactttcttgaggcttgtcctaaagtggagagtttcagtgccagaatgaattttcttgctgctatgcctttcttgcctccttctatgacaatcctaaaattatctcagaacaaattttcctgtattccagaagcaattttaaatcttccacacttgcggtctttagatatgagcagcaatgatattcagtacctaccaggtcccgcacactggaaatctttgaacttaagggaactcttatttagccataatcagatcagcatcttggacttgagtgaaaaagcatatttatggtctagagtagagaaactgcatctttctcacaataaactgaaagaggtttcttcaacagcgattaaaaaaggctgtgccttataaccgaatgaaacttatgattgtgggaaatactgggagtggtaaaaccaccttattgcagcaattaatgaaaaccaagaaatcagatcttggaatgcaaagtgccacagttggcatagatgtgaaagactggcctatccaaataagagacaaaagaaa

SEQ ID NO: 415 - DNA, 8403 bp, Homo sapiens
  source 1..8403: mol_type = genomic DNA
gatataggcatttagttttagatgttgctgcaaaatagtagtaggtatgtagtattttgatctcatcaccttcaggagttagaaaaggtagaatgagagttattattgagagatttggaatcaagggtcatttggtaattcatgaatcatggagaaagaatctttctattttctggctgatcgttttaaaatgccatattaattcatcttgggtgatagaaattgcagagccatctgtgatcttttcttctatggtgactagccagcaggttgtcaatatcagaaattagatttggttagagagcttcctatgatgagttcccaactgatgtgacagagttgacctgtcttctttcgagagggttatttgaagctgtcatctctggataactctttcaataggagtgccattcaaacatcataagaccggcactctctcccaaagatacaagctgtagcaaggagttttgtgcatatcagtttcccagctcatagggaagtgatgctctccatgctgatgcattcttcatcaaaggaagttttccaggcatctgcgaatgcattgtcaactctcttagaacaaaatgttaatttcagaaaaatactgttatcaaaaggaatacacctgaatgttttggagttaatgcagaagcatatacattctcctgaagtggctgaaagtggctgtaaaatgctaaatcatctttttgaaggaagcaacacttccctggatataatggcagcagtggtccccaaaatactaacagttatgaaacgtcatgagacatcattaccagtgcagctggaggcgcttcgagctattttacattttatagtgcctggcatgccagaagaatccagggaggatacagaatttcatcataagctaaatatggttaaaaaacagtgtttcaagaatgatattcacaaactggtcctagcagctttgaacaggttcattggaaatcctgggattcagaaatgtggattaaaagtaatttcttctattgtacattttcctgatgcattagagatgttatccctggaaggtgctatggattcagtgcttcacacactgcagatgtatccagatgaccaagaaattcagtgtctgggtttaagtcttataggatacttgattacaaagaagaatgtgttcataggaactggacatctgctggcaaaaattctggtttccagcttataccgatttaaggatgttgctgaaatacagactaaaggatttcagacaatcttagcaatcctcaaattgtcagcatctttttctaagctgctggtgcatcattcatttgacttagtaatattccatcaaatgtcttccaatatcatggaacaaaaggatcaacagtttctaaacctctgttgcaagtgttttgcaaaagtagctatggatgattacttaaaaaatgtgatgctagagagagcgtgtgatcagaataacagcatcatggttgaatgcttgcttctattgggagcagatgccaatcaagcaaaggagggatcttctttaatttgtcaggtatgtgagaaagagagcagtcccaaattggtggaactcttactgaatagtggatctcgtgaacaagatgtacgaaaagcgttgacgataagcattgggaaaggtgacagccagatcatcagcttgctcttaaggaggctggccctggatgtggccaacaatagcatttgccttggaggattttgtataggaaaagttgaaccttcttggcttggtcctttatttccagataagacttctaatttaaggaaacaaacaaatatagcatctacactagcaagaatggtgatcagatatcagatgaaaagtgctgtggaagaaggaacagcctcaggcagcgatggaaatttttctgaagatgtgctgtctaaatttgatgaatggacctttattcctgactcttctatggacagtgtgtttgctcaaagtgatgacctggatagtgaaggaagtgaaggctcatttcttgtgaaaaagaaatctaattcaattagtgtaggagaattttaccgagatgccgtattacagcgttgctcaccaaatttgcaaagacattccaattccttggggcccatttttgatcatgaagatttactgaagcgaaaaagaaaaatattatcttcagatgattcactcaggtcatcaaaacttcaatcccatatgaggcattcagacagcatttcttctctggcttctgagagagaatatattacatcactagacctttcagcaaatgaactaagagatattgatgccctaagccagaaatgctgtataagtgttcatttggagcatcttgaaaagctggagcttcaccagaatgcactcacgagctttccacaacagctatgtgaaactctgaagagtttgacacatttggacttgcacagtaataaatttacatcatttccttcttatttgttgaaaatgagttgtattgctaatcttgatgtctctcgaaatgacattggaccctcagtggttttagatcctacagtgaaatgtccaactctgaaacagtttaacctgtcatataaccagctgtcttttgtacctgagaacctcactgatgtggtagagaaactggagcagctcattttagaaggaaataaaatatcagggatatgctcccccttgagactgaaggaactgaagattttaaaccttagtaagaaccacatttcatccctatcagagaactttcttgaggcttgtcctaaagtggagagtttcagtgccagaatgaattttcttgctgctatgcctttcttgcctccttctatgacaatcctaaaattatctcagaacaaattttcctgtattccagaagcaattttaaatcttccacacttgcggtctttagatatgagcagcaatgatattcagtacctaccaggtcccgcacactggaaatctttgaacttaagggaactcttatttagccataatcagatcagcatcttggacttgagtgaaaaagcatatttatggtctagagtagagaaactgcatctttctcacaataaactgaaagagattcctcctgagattggctgtcttgaaaatctgacatctctggatgtcagttacaacttggaactaagatcctttcccaatgaaatggggaaattaagcaaaatatgggatcttcctttggatgaactgcatcttaactttgattttaaacatataggatgtaaagccaaagacatcataaggtttcttcaacagcgattaaaaaaggctgtgccttataaccgaatgaaacttatgattgtgggaaatactgggagtggtaaaaccaccttattgcagcaattaatgaaaaccaagaaatcagatcttggaatgcaaagtgccacagttggcatagatgtgaaagactggcctatccaaataagagacaaaagaaagagagatctcgtcctaaatgtgtgggattttgcaggtcgtgaggaattctatagtactcatccccattttatgacgcagcgagcattgtaccttgctgtctatgacctcagcaagggacaggctgaagttgatgccatgaagccttggctcttcaatataaaggctcgcgcttcttcttcccctgtgattctcgttggcacacatttggatgtttctgatgagaagcaacgcaaagcctgcatgagtaaaatcaccaaggaactcctgaataagcgagggttccctgccatacgagattaccactttgtgaatgccaccgaggaatctgatgctttggcaaaacttcggaaaaccatcataaacgagagccttaatttcaagatccgagatcagcttgttgttggacagctgattccagactgctatgtagaacttgaaaaaatcattttatcggagcgtaaaaatgtgccaattgaatttcccgtaattgaccggaaacgattattacaactagtgagagaaaatcagctgcagttagatgaaaatgagcttcctcacgcagttcactttctaaatgaatcaggagtccttcttcattttcaagacccagcactgcagttaagtgacttgtactttgtggaacccaagtggctttgtaaaatcatggcacagattttgacagtgaaagtggaaggttgtccaaaacaccctaagggcattatttcgcgtagagatgtggaaaaatttctttcaaaaaaaaggaaatttccaaagaactacatgtcacagtattttaagctcctagaaaaattccagattgctttgccaataggagaagaatatttgctggttccaagcagtttgtctgaccacaggcctgtgatagagcttccccattgtgagaactctgaaattatcatccgactatatgaaatgccttattttccaatgggattttggtcaagattaatcaatcgattacttgagatttcaccttacatgctttcagggagagaacgagcacttcgcccaaacagaatgtattggcgacaaggcatttacttaaattggtctcctgaagcttattgtctggtaggatctgaagtcttagacaatcatccagagagtttcttaaaaattacagttccttcttgtagaaaaggctgtattcttttgggccaagttgtggaccacattgattctctcatggaagaatggtttcctgggttgctggagattgatatttgtggtgaaggagaaactctgttgaagaaatgggcattatatagttttaatgatggtgaagaacatcaaaaaatcttacttgatgacttgatgaagaaagcagaggaaggagatctcttagtaaatccagatcaaccaaggctcaccattccaatatctcagattgcccctgacttgattttggctgacctgcctagaaatattatgttgaataatgatgagttggaatttgaacaagctccagagtttctcctaggtgatggcagttttggatcagtttaccgagcagcctatgaaggagaagaagtggctgtgaagatttttaataaacatacatcactcaggctgttaagacaagagcttgtggtgctttgccacctccaccaccccagtttgatatctttgctggcagctgggattcgtccccggatgttggtgatggagttagcctccaagggttccttggatcgcctgcttcagcaggacaaagccagcctcactagaaccctacagcacaggattgcactccacgtagctgatggtttgagatacctccactcagccatgattatataccgagacctgaaaccccacaatgtgctgcttttcacactgtatcccaatgctgccatcattgcaaagattgctgactacggcattgctcagtactgctgtagaatggggataaaaacatcagagggcacaccagggtttcgtgcacctgaagttgccagaggaaatgtcatttataaccaacaggctgatgtttattcatttggtttactactctatgacattttgacaactggaggtagaatagtagagggtttgaagtttccaaatgagtttgatgaattagaaatacaaggaaaattacctgatccagttaaagaatatggttgtgccccatggcctatggttgagaaattaattaaacagtgtttgaaagaaaatcctcaagaaaggcctacttctgcccaggtctttgacattttgaattcagctgaattagtctgtctgacgagacgcattttattacctaaaaacgtaattgttgaatgcatggttgctacacatcacaacagcaggaatgcaagcatttggctgggctgtgggcacaccgacagaggacagctctcatttcttgacttaaatactgaaggatacacttctgaggaagttgctgatagtagaatattgtgcttagccttggtgcatcttcctgttgaaaaggaaagctggattgtgtctgggacacagtctggtactctcctggtcatcaataccgaagatgggaaaaagagacataccctagaaaagatgactgattctgtcacttgtttgtattgcaattccttttccaagcaaagcaaacaaaaaaattttcttttggttggaaccgctgatggcaagttagcaatttttgaagataagactgttaagcttaaaggagctgctcctttgaagatactaaatataggaaatgtcagtactccattgatgtgtttgagtgaatccacaaattcaacggaaagaaatgtaatgtggggaggatgtggcacaaagattttctccttttctaatgatttcaccattcagaaactcattgagacaagaacaagccaactgttttcttatgcagctttcagtgattccaacatcataacagtggtggtagacactgctctctatattgctaagcaaaatagccctgttgtggaagtgtgggataagaaaactgaaaaactctgtggactaatagactgcgtgcactttttaagggaggtaatggtaaaagaaaacaaggaatcaaaacacaaaatgtcttattctgggagagtgaaaaccctctgccttcagaagaacactgctctttggataggaactggaggaggccatattttactcctggatctttcaactcgtcgacttatacgtgtaatttacaacttttgtaattcggtcagagtcatgatgacagcacagctaggaagccttaaaaatgtcatgctggtattgggctacaaccggaaaaatactgaaggtacacaaaagcagaaagagatacaatcttgcttgaccgtttgggacatcaatcttccacatgaagtgcaaaatttagaaaaacacattgaagtgagaaaagaattagctgaaaaaatgagacgaacatctgttgagtaagagagaaataggaattgtctttggataggaaaattattctctcctcttgtaaatatttattttaaaaatgttcacatggaaagggtactcacattttttgaaatagctcgtgtgtatgaaggaatgttattatttttaatttaaatatatgtaaaaatacttaccagtaaatgtgtattttaaagaactatttaaaacacaatgttatatttcttataaataccagttactttcgttcattaattaatgaaaataaatctgtgaagtacctaatttaagtactcatactaaaatttataaggccgataattttttgttttcttgtctgtaatggaggtaaactttattttaaattctgtgcttaagacaggactattgcttgtcgatttttctagaaatctgcacggtataatgaaaatattaagacagtttcccatgtaatgtattccttcttagattgcatcgaaatgcactatcatatatgcttgtaaatattcaaatgaatttgcactaataaagtcctttgttggtatgtgaattctctttgttgctgttgcaaacagtgcatcttacacaacttcactcaattcaaaagaaaactccattaaaagtactaatgaaaaaacatgacatactgtcaaagtcctcatatctaggaaagacacagaaactctctttgtcacagaaactctctgtgtctttcctagacataatagagttgtttttcaactctatgtttgaatgtggataccctgaattttgtataattagtgtaaatacagtgttcagtccttcaagtgatatttttatttttttattcataccactagctacttgttttctaatctgcttcattctaatgcttatattcatcttttccctaaatttgtgatgctgcagatcctacatcattcagatagaaacctttttttttttcagaattatagaattccacagctcctaccaagaccatgaggataaatatctaacacttttcagttgctgaaggagaaaggagctttagttatgatggataaaaatatctgccaccctaggcttccaaattatacttaaattgtttacatagcttaccacaataggagtatcagggccaaatacctatgtaataatttgaggtcatttctgctttaggaaaagtactttcggtaaattctttggccctgaccagtattcattatttcagataattccctgtgataggacaactagtacatttaatattctcagaacttatggcattttactatgtgaaaactttaaatttatttatattaagggtaatcaaattcttaaagatgaaagattttctgtattttaaaggaagctatgctttaacttgttatgtaattaacaaaaaaatcatatataatagagctctttgttccagtgttatctctttcattgttactttgtatttgcaattttttttaccaaagacaaattaaaaaaatgaataccatatttaaatggaataataaaggttttttaaaaactttaaa

SEQ ID NO: 416 - DNA, 6169 bp, Homo sapiens
  source 1..6169: mol_type = genomic DNA
gaaatctaattcaattagtgtaggagaattttaccgagatgccgtattacagcgttgctcaccaaatttgcaaagacattccaattccttggggcccatttttgatcatgaagatttactgaagcgaaaaagaaaaatattatcttcagatgattcactcaactctgaagagtttgacacatttggacttgcacagtaataaatttacatcatttccttcttatttgttgaaaatgagttgtattgctaatcttgatgtctctcgaaatgacattggaccctcagtggttttagatcctacagtgaaatgtccaactctgaaacagtttaacctgtcatataaccagctgtcttttgtacctgagaacctcactgatgtggtagagaaactggagcagctcattttagaaggaaataaaatatcagggatatgctcccccttgagactgaaggaactgaagattttaaaccttagtaagaaccacatttcatccctatcagagaactttcttgaggcttgtcctaaagtggagagtttcagtgccagaatgaattttcttgctgctatgcctttcttgcctccttctatgacaatcctaaaattatctcagaacaaattttcctgtattccagaagcaattttaaatcttccacacttgcggtctttagatatgagcagcaatgatattcagtacctaccaggtcccgcacactggaaatctttgaacttaagggaactcttatttagccataatcagatcagcatcttggacttgagtgaaaaagcatatttatggtctagagtagagaaactgcatctttctcacaataaactgaaagagattcctcctgagattggctgtcttgaaaatctgacatctctggatgtcagttacaacttggaactaagatcctttcccaatgaaatggggaaattaagcaaaatatgggatcttcctttggatgaactgcatcttaactttgattttaaacatataggatgtaaagccaaagacatcataaggtttcttcaacagcgattaaaaaaggctgtgccttataaccgaatgaaacttatgattgtgggaaatactgggagtggtaaaaccaccttattgcagcaattaatgaaaaccaagaaatcagatcttggaatgcaaagtgccacagttggcatagatgtgaaagactggcctatccaaataagagacaaaagaaagagagatctcgtcctaaatgtgtgggattttgcaggtcgtgaggaattctatagtactcatccccattttatgacgcagcgagcattgtaccttgctgtctatgacctcagcaagggacaggctgaagttgatgccatgaagccttggctcttcaatataaaggctcgcgcttcttcttcccctgtgattctcgttggcacacatttggatgtttctgatgagaagcaacgcaaagcctgcatgagtaaaatcaccaaggaactcctgaataagcgagggttccctgccatacgagattaccactttgtgaatgccaccgaggaatctgatgctttggcaaaacttcggaaaaccatcataaacgagagccttaatttcaagatccgagatcagcttgttgttggacagctgattccagactgctatgtagaacttgaaaaaatcattttatcggagcgtaaaaatgtgccaattgaatttcccgtaattgaccggaaacgattattacaactagtgagagaaaatcagctgcagttagatgaaaatgagcttcctcacgcagttcactttctaaatgaatcaggagtccttcttcattttcaagacccagcactgcagttaagtgacttgtactttgtggaacccaagtggctttgtaaaatcatggcacagattttgacagtgaaagtggaaggttgtccaaaacaccctaagggcattatttcgcgtagagatgtggaaaaatttctttcaaaaaaaaggaaatttccaaagaactacatgtcacagtattttaagctcctagaaaaattccagattgctttgccaataggagaagaatatttgctggttccaagcagtttgtctgaccacaggcctgtgatagagcttccccattgtgagaactctgaaattatcatccgactatatgaaatgccttattttccaatgggattttggtcaagattaatcaatcgattacttgagatttcaccttacatgctttcagggagagaacgagcacttcgcccaaacagaatgtattggcgacaaggcatttacttaaattggtctcctgaagcttattgtctggtaggatctgaagtcttagacaatcatccagagagtttcttaaaaattacagttccttcttgtagaaaaggctgtattcttttgggccaagttgtggaccacattgattctctcatggaagaatggtttcctgggttgctggagattgatatttgtggtgaaggagaaactctgttgaagaaatgggcattatatagttttaatgatggtgaagaacatcaaaaaatcttacttgatgacttgatgaagaaagcagaggaaggagatctcttagtaaatccagatcaaccaaggctcaccattccaatatctcagattgcccctgacttgattttggctgacctgcctagaaatattatgttgaataatgatgagttggaatttgaacaagctccagagtttctcctaggtgatggcagttttggatcagtttaccgagcagcctatgaaggagaagaagtggctgtgaagatttttaataaacatacatcactcaggctgttaagacaagagcttgtggtgctttgccacctccaccaccccagtttgatatctttgctggcagctgggattcgtccccggatgttggtgatggagttagcctccaagggttccttggatcgcctgcttcagcaggacaaagccagcctcactagaaccctacagcacaggattgcactccacgtagctgatggtttgagatacctccactcagccatgattatataccgagacctgaaaccccacaatgtgctgcttttcacactgtatcccaatgctgccatcattgcaaagattgctgactacggcattgctcagtactgctgtagaatggggataaaaacatcagagggcacaccagggtttcgtgcacctgaagttgccagaggaaatgtcatttataaccaacaggctgatgtttattcatttggtttactactctatgacattttgacaactggaggtagaatagtagagggtttgaagtttccaaatgagtttgatgaattagaaatacaaggaaaattacctgatccagttaaagaatatggttgtgccccatggcctatggttgagaaattaattaaacagtgtttgaaagaaaatcctcaagaaaggcctacttctgcccaggtctttgacattttgaattcagctgaattagtctgtctgacgagacgcattttattacctaaaaacgtaattgttgaatgcatggttgctacacatcacaacagcaggaatgcaagcatttggctgggctgtgggcacaccgacagaggacagctctcatttcttgacttaaatactgaaggatacacttctgaggaagttgctgatagtagaatattgtgcttagccttggtgcatcttcctgttgaaaaggaaagctggattgtgtctgggacacagtctggtactctcctggtcatcaataccgaagatgggaaaaagagacataccctagaaaagatgactgattctgtcacttgtttgtattgcaattccttttccaagcaaagcaaacaaaaaaattttcttttggttggaaccgctgatggcaagttagcaatttttgaagataagactgttaagcttaaaggagctgctcctttgaagatactaaatataggaaatgtcagtactccattgatgtgtttgagtgaatccacaaattcaacggaaagaaatgtaatgtggggaggatgtggcacaaagattttctccttttctaatgatttcaccattcagaaactcattgagacaagaacaagccaactgttttcttatgcagctttcagtgattccaacatcataacagtggtggtagacactgctctctatattgctaagcaaaatagccctgttgtggaagtgtgggataagaaaactgaaaaactctgtggactaatagactgcgtgcactttttaagggaggtaatggtaaaagaaaacaaggaatcaaaacacaaaatgtcttattctgggagagtgaaaaccctctgccttcagaagaacactgctctttggataggaactggaggaggccatattttactcctggatctttcaactcgtcgacttatacgtgtaatttacaacttttgtaattcggtcagagtcatgatgacagcacagctaggaagccttaaaaatgtcatgctggtattgggctacaaccggaaaaatactgaaggtacacaaaagcagaaagagatacaatcttgcttgaccgtttgggacatcaatcttccacatgaagtgcaaaatttagaaaaacacattgaagtgagaaaagaattagctgaaaaaatgagacgaacatctgttgagtaagagagaaataggaattgtctttggataggaaaattattctctcctcttgtaaatatttattttaaaaatgttcacatggaaagggtactcacattttttgaaatagctcgtgtgtatgaaggaatgttattatttttaatttaaatatatgtaaaaatacttaccagtaaatgtgtattttaaagaactatttaaaacacaatgttatatttcttataaataccagttactttcgttcattaattaatgaaaataaatctgtgaagtacctaatttaagtactcatactaaaatttataaggccgataattttttgttttcttgtctgtaatggaggtaaactttattttaaattctgtgcttaagacaggactattgcttgtcgatttttctagaaatctgcacggtataatgaaaatattaagacagtttcccatgtaatgtattccttcttagattgcatcgaaatgcactatcatatatgcttgtaaatattcaaatgaatttgcactaataaagtcctttgttggtatgtgaattctctttgttgctgttgcaaacagtgcatcttacacaacttcactcaattcaaaagaaaactccattaaaagtactaatgaaaaaacatgacatactgtcaaagtcctcatatctaggaaagacacagaaactctctttgtcacagaaactctctgtgtctttcctagacataatagagttgtttttcaactctatgtttgaatgtggataccctgaattttgtataattagtgtaaatacagtgttcagtccttcaagtgatatttttatttttttattcataccactagctacttgttttctaatctgcttcattctaatgcttatattcatcttttccctaaatttgtgatgctgcagatcctacatcattcagatagaaacctttttttttttcagaattatagaattccacagctcctaccaagaccatgaggataaatatctaacacttttcagttgctgaaggagaaaggagctttagttatgatggataaaaatatctgccaccctaggcttccaaattatacttaaattgtttacatagcttaccacaataggagtatcagggccaaatacctatgtaataatttgaggtcatttctgctttaggaaaagtactttcggtaaattctttggccctgaccagtattcattatttcagataattccctgtgataggacaactagtacatttaatattctcagaacttatggcattttactatgtgaaaactttaaatttatttatattaagggtaatcaaattcttaaagatgaaagattttctgtattttaaaggaagctatgctttaacttgttatgtaattaacaaaaaaatcatatataatagagctctttgttccagtgttatctctttcattgttactttgtatttgcaattttttttaccaaagacaaattaaaaaaatgaataccatatttaaatggaataataaaggttttttaaaaactttaaa

SEQ ID NO: 417 - DNA, 2492 bp, Homo sapiens
  source 1..2492: mol_type = genomic DNA
gcttctccattctggtgtgatccaggaacagctgtcttccagctctgaaagagtgtggtgtaaaggaattcattagccatggatgtattcatgaaaggactttcaaaggccaaggagggagttgtggctgctgctgagaaaaccaaacagggtgtggcagaagcagcaggaaagacaaaagagggtgttctctatgtaggctccaaaaccaaggagggagtggtgcatggtgtggcaacagtggctgagaagaccaaagagcaagtgacaaatgttggaggagcagtggtgacgggtgtgacagcagtagcccagaagacagtggagggagcagggagcattgcagcagccactggctttgtcaaaaaggaccagttgggcaagaatgaagaaggagccccacaggaaggaattctggaagatatgcctgtggatcctgacaatgaggcttatgaaatgccttctgaggaagggtatcaagactacgaacctgaagcctaagaaatatctttgctcccagtttcttgagatctgctgacagatgttccatcctgtacaagtgctcagttccaatgtgcccagtcatgacatttctcaaagtttttacagtgtatctcgaagtcttccatcagcagtgattgaagtatctgtacctgcccccactcagcatttcggtgcttccctttcactgaagtgaatacatggtagcagggtctttgtgtgctgtggattttgtggcttcaatctacgatgttaaaacaaattaaaaacacctaagtgactaccacttatttctaaatcctcactatttttttgttgctgttgttcagaagttgttagtgatttgctatcatatattataagatttttaggtgtcttttaatgatactgtctaagaataatgacgtattgtgaaatttgttaatatatataatacttaaaaatatgtgagcatgaaactatgcacctataaatactaaatatgaaattttaccattttgcgatgtgttttattcacttgtgtttgtatataaatggtgagaattaaaataaaacgttatctcattgcaaaaatattttatttttatcccatctcactttaataataaaaatcatgcttataagcaacatgaattaagaactgacacaaaggacaaaaatataaagttattaatagccatttgaagaaggaggaattttagaagaggtagagaaaatggaacattaaccctacactcggaattccctgaagcaacactgccagaagtgtgttttggaaatgcctttaaacatcgttggaactaccagagtcaccttaaaggagatcaattctctagactgataaaaatttcatggcctcctttaaatgttgccaaatatatgaattctaggatttttccttaggaaaggtttttctctttcagggaagatctattaactccccatgggtgctgaaaataaacttgatggtgaaaaactctgtataaattaatttaaaaattatttggtttctctttttaattattctggggcatagtcatttctaaaagtcactagtagaaagtataatttcaagacagaatattctagacatgctagcagtttatatgtattcatgagtaatgtgatatatattgggcgctggtgaggaaggaaggaggaatgagtgactataaggatggttaccatagaaacttccttttttacctaattgaagagagactactacagagtgctaagctgcatgtgtcatcttacactagagagaaatggtaagtttcttgttttatttaagttatgtttaagcaaggaaaggatttgttattgaacagtatatttcaggaaggttagaaagtggcggttaggatatattttaaatctacctaaagcagcatattttaaaaatttaaaagtattggtattaaattaagaaatagaggacagaactagactgatagcagtgacctagaacaatttgagattaggaaagttgtgaccatgaatttaaggatttatgtggatacaaattctcctttaaagtgtttcttcccttaatatttatctgacggtaatttttgagcagtgaattactttatatatcttaatagtttatttgggaccaaacacttaaacaaaaagttctttaagtcatataagccttttcaggaagcttgtctcatattcactcccgagacattcacctgccaagtggcctgaggatcaatccagtcctaggtttattttgcagacttacattctcccaagttattcagcctcatatgactccacggtcggctttaccaaaacagttcagagtgcactttggcacacaattgggaacagaacaatctaatgtgtggtttggtattccaagtggggtctttttcagaatctctgcactagtgtgagatgcaaacatgtttcctcatctttctggcttatccagtatgtagctatttgtgacataataaatatatacatatatgaaaata

SEQ ID NO: 418 - DNA, 2639 bp, Homo sapiens
  source 1..2639: mol_type = genomic DNA
ggcgacgaccagaaggggcccaagagagggggcgagcgaccgagcgccgcgacgcggaagtgaggtgcgtgcgggctgcagcgcagaccccggcccggcccctccgagagcgtcctgggcgctccctcacgccttgccttcaagccttctgcctttccaccctcgtgagcggagaactgggagtggccattcgacgacagtgtggtgtaaaggaattcattagccatggatgtattcatgaaaggactttcaaaggccaaggagggagttgtggctgctgctgagaaaaccaaacagggtgtggcagaagcagcaggaaagacaaaagagggtgttctctatgtaggctccaaaaccaaggagggagtggtgcatggtgtggcaacagtggctgagaagaccaaagagcaagtgacaaatgttggaggagcagtggtgacgggtgtgacagcagtagcccagaagacagtggagggagcagggagcattgcagcagccactggctttgtcaaaaaggaccagttgggcaagaatgaagaaggagccccacaggaaggaattctggaagatatgcctgtggatcctgacaatgaggcttatgaaatgccttctgaggaagggtatcaagactacgaacctgaagcctaagaaatatctttgctcccagtttcttgagatctgctgacagatgttccatcctgtacaagtgctcagttccaatgtgcccagtcatgacatttctcaaagtttttacagtgtatctcgaagtcttccatcagcagtgattgaagtatctgtacctgcccccactcagcatttcggtgcttccctttcactgaagtgaatacatggtagcagggtctttgtgtgctgtggattttgtggcttcaatctacgatgttaaaacaaattaaaaacacctaagtgactaccacttatttctaaatcctcactatttttttgttgctgttgttcagaagttgttagtgatttgctatcatatattataagatttttaggtgtcttttaatgatactgtctaagaataatgacgtattgtgaaatttgttaatatatataatacttaaaaatatgtgagcatgaaactatgcacctataaatactaaatatgaaattttaccattttgcgatgtgttttattcacttgtgtttgtatataaatggtgagaattaaaataaaacgttatctcattgcaaaaatattttatttttatcccatctcactttaataataaaaatcatgcttataagcaacatgaattaagaactgacacaaaggacaaaaatataaagttattaatagccatttgaagaaggaggaattttagaagaggtagagaaaatggaacattaaccctacactcggaattccctgaagcaacactgccagaagtgtgttttggaaatgcctttaaacatcgttggaactaccagagtcaccttaaaggagatcaattctctagactgataaaaatttcatggcctcctttaaatgttgccaaatatatgaattctaggatttttccttaggaaaggtttttctctttcagggaagatctattaactccccatgggtgctgaaaataaacttgatggtgaaaaactctgtataaattaatttaaaaattatttggtttctctttttaattattctggggcatagtcatttctaaaagtcactagtagaaagtataatttcaagacagaatattctagacatgctagcagtttatatgtattcatgagtaatgtgatatatattgggcgctggtgaggaaggaaggaggaatgagtgactataaggatggttaccatagaaacttccttttttacctaattgaagagagactactacagagtgctaagctgcatgtgtcatcttacactagagagaaatggtaagtttcttgttttatttaagttatgtttaagcaaggaaaggatttgttattgaacagtatatttcaggaaggttagaaagtggcggttaggatatattttaaatctacctaaagcagcatattttaaaaatttaaaagtattggtattaaattaagaaatagaggacagaactagactgatagcagtgacctagaacaatttgagattaggaaagttgtgaccatgaatttaaggatttatgtggatacaaattctcctttaaagtgtttcttcccttaatatttatctgacggtaatttttgagcagtgaattactttatatatcttaatagtttatttgggaccaaacacttaaacaaaaagttctttaagtcatataagccttttcaggaagcttgtctcatattcactcccgagacattcacctgccaagtggcctgaggatcaatccagtcctaggtttattttgcagacttacattctcccaagttattcagcctcatatgactccacggtcggctttaccaaaacagttcagagtgcactttggcacacaattgggaacagaacaatctaatgtgtggtttggtattccaagtggggtctttttcagaatctctgcactagtgtgagatgcaaacatgtttcctcatctttctggcttatccagtatgtagctatttgtgacataataaatatatacatatatgaaaata

SEQ ID NO: 419 - DNA, 3250 bp, Homo sapiens
  source 1..3250: mol_type = genomic DNA
ggcgacgaccagaaggggcccaagagagggggcgagcgaccgagcgccgcgacgcggaagtgaggtgcgtgcgggctgcagcgcagaccccggcccggcccctccgagagcgtcctgggcgctccctcacgccttgccttcaagccttctgcctttccaccctcgtgagcggagaactgggagtggccattcgacgacaggttagcgggtttgcctcccactcccccagcctcgcgtcgccggctcacagcggcctcctctggggacagtcccccccgggtgccgcctccgcccttcctgtgcgctccttttccttcttctttcctattaaatattatttgggaattgtttaaattttttttttaaaaaaagagagaggcggggaggagtcggagttgtggagaagcagagggactcaggctccaaaaccaaggagggagtggtgcatggtgtggcaacagtggctgagaagaccaaagagcaagtgacaaatgttggaggagcagtggtgacgggtgtgacagcagtagcccagaagacagtggagggagcagggagcattgcagcagccactggctttgtcaaaaaggaccagttgggcaagaatgaagaaggagccccacaggaaggaattctggaagatatgcctgtggatcctgacaatgaggcttatgaaatgccttctgaggaagggtatcaagactacgaacctgaagcctaagaaatatctttgctcccagtttcttgagatctgctgacagatgttccatcctgtacaagtgctcagttccaatgtgcccagtcatgacatttctcaaagtttttacagtgtatctcgaagtcttccatcagcagtgattgaagtatctgtacctgcccccactcagcatttcggtgcttccctttcactgaagtgaatacatggtagcagggtctttgtgtgctgtggattttgtggcttcaatctacgatgttaaaacaaattaaaaacacctaagtgactaccacttatttctaaatcctcactatttttttgttgctgttgttcagaagttgttagtgatttgctatcatatattataagatttttaggtgtcttttaatgatactgtctaagaataatgacgtattgtgaaatttgttaatatatataatacttaaaaatatgtgagcatgaaactatgcacctataaatactaaatatgaaattttaccattttgcgatgtgttttattcacttgtgtttgtatataaatggtgagaattaaaataaaacgttatctcattgcaaaaatattttatttttatcccatctcactttaataataaaaatcatgcttataagcaacatgaattaagaactgacacaaaggacaaaaatataaagttattaatagccatttgaagaaggaggaattttagaagaggtagagaaaatggaacattaaccctacactcggaattccctgaagcaacactgccagaagtgtgttttggtatgcactggttccttaagtggctgtgattaattattgaaagtggggtgttgaagaccccaactactattgtagagtggtctatttctcccttcaatcctgtcaatgtttgctttacgtattttggggaactgttgtttgatgtgtatgtgtttataattgttatacatttttaattgagccttttattaacatatattgttatttttgtctcgaaataattttttagttaaaatctattttgtctgatattggtgtgaatgctgtacctttctgacaataaataatattcgaccatgaataaaaaaaaaaaaaaagtgggttcccgggaactaagcagtgtagaagatgattttgactacaccctccttagagagccataagacacattagcacatattagcacattcaaggctctgagagaatgtggttaactttgtttaactcagcattcctcactttttttttttaatcatcagaaattctctctctctctctctctttttctctcgctctctttttttttttttttttacaggaaatgcctttaaacatcgttggaactaccagagtcaccttaaaggagatcaattctctagactgataaaaatttcatggcctcctttaaatgttgccaaatatatgaattctaggatttttccttaggaaaggtttttctctttcagggaagatctattaactccccatgggtgctgaaaataaacttgatggtgaaaaactctgtataaattaatttaaaaattatttggtttctctttttaattattctggggcatagtcatttctaaaagtcactagtagaaagtataatttcaagacagaatattctagacatgctagcagtttatatgtattcatgagtaatgtgatatatattgggcgctggtgaggaaggaaggaggaatgagtgactataaggatggttaccatagaaacttccttttttacctaattgaagagagactactacagagtgctaagctgcatgtgtcatcttacactagagagaaatggtaagtttcttgttttatttaagttatgtttaagcaaggaaaggatttgttattgaacagtatatttcaggaaggttagaaagtggcggttaggatatattttaaatctacctaaagcagcatattttaaaaatttaaaagtattggtattaaattaagaaatagaggacagaactagactgatagcagtgacctagaacaatttgagattaggaaagttgtgaccatgaatttaaggatttatgtggatacaaattctcctttaaagtgtttcttcccttaatatttatctgacggtaatttttgagcagtgaattactttatatatcttaatagtttatttgggaccaaacacttaaacaaaaagttctttaagtcatataagccttttcaggaagcttgtctcatattcactcccgagacattcacctgccaagtggcctgaggatcaatccagtcctaggtttattttgcagacttacattctcccaagttattcagcctcatatgactccacggtcggctttaccaaaacagttcagagtgcactttggcacacaattgggaacagaacaatctaatgtgtggtttggtattccaagtggggtctttttcagaatctctgcactagtgtgagatgcaaacatgtttcctcatctttctggcttatccagtatgtagctatttgtgacataataaatatatacatatatgaaaata

SEQ ID NO: 420 - DNA, 3030 bp, Homo sapiens
  source 1..3030: mol_type = genomic DNA
gcttctccattctggtgtgatccaggaacagctgtcttccagctctgaaagagtgtggtgtaaaggaattcattagccatggatgtattcatgaaaggactttcaaaggccaaggagggagttgtggctgctgctgagaaaaccaaacagggtgtggcagaagcagcaggaaagacaaaagagggtgttctctatgtaggctccaaaaccaaggagggagtggtgcatggtgtggcaacagtggctgagaagaccaaagagcaagtgacaaatgttggaggagcagtggtgacgggtgtgacagcagtagcccagaagacagtggagggagcagggagcattgcagcagccactggctttgtcaaaaaggaccagttgggcaagaatgaagaaggagccccacaggaaggaattctggaagatatgcctgtggatcctgacaatgaggcttatgaaatgccttctgaggaagggtatcaagactacgaacctgaagcctaagaaatatctttgctcccagtttcttgagatctgctgacagatgttccatcctgtacaagtgctcagttccaatgtgcccagtcatgacatttctcaaagtttttacagtgtatctcgaagtcttccatcagcagtgattgaagtatctgtacctgcccccactcagcatttcggtgcttccctttcactgaagtgaatacatggtagcagggtctttgtgtgctgtggattttgtggcttcaatctacgatgttaaaacaaattaaaaacacctaagtgactaccacttatttctaaatcctcactatttttttgttgctgttgttcagaagttgttagtgatttgctatcatatattataagatttttaggtgtcttttaatgatactgtctaagaataatgacgtattgtgaaatttgttaatatatataatacttaaaaatatgtgagcatgaaactatgcacctataaatactaaatatgaaattttaccattttgcgatgtgttttattcacttgtgtttgtatataaatggtgagaattaaaataaaacgttatctcattgcaaaaatattttatttttatcccatctcactttaataataaaaatcatgcttataagcaacatgaattaagaactgacacaaaggacaaaaatataaagttattaatagccatttgaagaaggaggaattttagaagaggtagagaaaatggaacattaaccctacactcggaattccctgaagcaacactgccagaagtgtgttttggtatgcactggttccttaagtggctgtgattaattattgaaagtggggtgttgaagaccccaactactattgtagagtggtctatttctcccttcaatcctgtcaatgtttgctttacgtattttggggaactgttgtttgatgtgtatgtgtttataattgttatacatttttaattgagccttttattaacatatattgttatttttgtctcgaaataattttttagttaaaatctattttgtctgatattggtgtgaatgctgtacctttctgacaataaataatattcgaccatgaataaaaaaaaaaaaaaagtgggttcccgggaactaagcagtgtagaagatgattttgactacaccctccttagagagccataagacacattagcacatattagcacattcaaggctctgagagaatgtggttaactttgtttaactcagcattcctcactttttttttttaatcatcagaaattctctctctctctctctctttttctctcgctctctttttttttttttttttacaggaaatgcctttaaacatcgttggaactaccagagtcaccttaaaggagatcaattctctagactgataaaaatttcatggcctcctttaaatgttgccaaatatatgaattctaggatttttccttaggaaaggtttttctctttcagggaagatctattaactccccatgggtgctgaaaataaacttgatggtgaaaaactctgtataaattaatttaaaaattatttggtttctctttttaattattctggggcatagtcatttctaaaagtcactagtagaaagtataatttcaagacagaatattctagacatgctagcagtttatatgtattcatgagtaatgtgatatatattgggcgctggtgaggaaggaaggaggaatgagtgactataaggatggttaccatagaaacttccttttttacctaattgaagagagactactacagagtgctaagctgcatgtgtcatcttacactagagagaaatggtaagtttcttgttttatttaagttatgtttaagcaaggaaaggatttgttattgaacagtatatttcaggaaggttagaaagtggcggttaggatatattttaaatctacctaaagcagcatattttaaaaatttaaaagtattggtattaaattaagaaatagaggacagaactagactgatagcagtgacctagaacaatttgagattaggaaagttgtgaccatgaatttaaggatttatgtggatacaaattctcctttaaagtgtttcttcccttaatatttatctgacggtaatttttgagcagtgaattactttatatatcttaatagtttatttgggaccaaacacttaaacaaaaagttctttaagtcatataagccttttcaggaagcttgtctcatattcactcccgagacattcacctgccaagtggcctgaggatcaatccagtcctaggtttattttgcagacttacattctcccaagttattcagcctcatatgactccacggtcggctttaccaaaacagttcagagtgcactttggcacacaattgggaacagaacaatctaatgtgtggtttggtattccaagtggggtctttttcagaatctctgcactagtgtgagatgcaaacatgtttcctcatctttctggcttatccagtatgtagctatttgtgacataataaatatatacatatatgaaaata

SEQ ID NO: 421 - DNA, 3099 bp, Homo sapiens
  source 1..3099: mol_type = genomic DNA
gcttctccattctggtgtgatccaggaacagctgtcttccagctctgaaagagggctgagagattaggctgcttctccgggatccgcttttccccgggaaacgcgaggatgctccatggagctgtggtgtaaaggaattcattagccatggatgtattcatgaaaggactttcaaaggccaaggagggagttgtggctgctgctgagaaaaccaaacagggtgtggcagaagcagcaggaaagacaaaagagggtgttctctatgtaggctccaaaaccaaggagggagtggtgcatggtgtggcaacagtggctgagaagaccaaagagcaagtgacaaatgttggaggagcagtggtgacgggtgtgacagcagtagcccagaagacagtggagggagcagggagcattgcagcagccactggctttgtcaaaaaggaccagttgggcaagaatgaagaaggagccccacaggaaggaattctggaagatatgcctgtggatcctgacaatgaggcttatgaaatgccttctgaggaagggtatcaagactacgaacctgaagcctaagaaatatctttgctcccagtttcttgagatctgctgacagatgttccatcctgtacaagtgctcagttccaatgtgcccagtcatgacatttctcaaagtttttacagtgtatctcgaagtcttccatcagcagtgattgaagtatctgtacctgcccccactcagcatttcggtgcttccctttcactgaagtgaatacatggtagcagggtctttgtgtgctgtggattttgtggcttcaatctacgatgttaaaacaaattaaaaacacctaagtgactaccacttatttctaaatcctcactatttttttgttgctgttgttcagaagttgttagtgatttgctatcatatattataagatttttaggtgtcttttaatgatactgtctaagaataatgacgtattgtgaaatttgttaatatatataatacttaaaaatatgtgagcatgaaactatgcacctataaatactaaatatgaaattttaccattttgcgatgtgttttattcacttgtgtttgtatataaatggtgagaattaaaataaaacgttatctcattgcaaaaatattttatttttatcccatctcactttaataataaaaatcatgcttataagcaacatgaattaagaactgacacaaaggacaaaaatataaagttattaatagccatttgaagaaggaggaattttagaagaggtagagaaaatggaacattaaccctacactcggaattccctgaagcaacactgccagaagtgtgttttggtatgcactggttccttaagtggctgtgattaattattgaaagtggggtgttgaagaccccaactactattgtagagtggtctatttctcccttcaatcctgtcaatgtttgctttacgtattttggggaactgttgtttgatgtgtatgtgtttataattgttatacatttttaattgagccttttattaacatatattgttatttttgtctcgaaataattttttagttaaaatctattttgtctgatattggtgtgaatgctgtacctttctgacaataaataatattcgaccatgaataaaaaaaaaaaaaaagtgggttcccgggaactaagcagtgtagaagatgattttgactacaccctccttagagagccataagacacattagcacatattagcacattcaaggctctgagagaatgtggttaactttgtttaactcagcattcctcactttttttttttaatcatcagaaattctctctctctctctctctttttctctcgctctctttttttttttttttttacaggaaatgcctttaaacatcgttggaactaccagagtcaccttaaaggagatcaattctctagactgataaaaatttcatggcctcctttaaatgttgccaaatatatgaattctaggatttttccttaggaaaggtttttctctttcagggaagatctattaactccccatgggtgctgaaaataaacttgatggtgaaaaactctgtataaattaatttaaaaattatttggtttctctttttaattattctggggcatagtcatttctaaaagtcactagtagaaagtataatttcaagacagaatattctagacatgctagcagtttatatgtattcatgagtaatgtgatatatattgggcgctggtgaggaaggaaggaggaatgagtgactataaggatggttaccatagaaacttccttttttacctaattgaagagagactactacagagtgctaagctgcatgtgtcatcttacactagagagaaatggtaagtttcttgttttatttaagttatgtttaagcaaggaaaggatttgttattgaacagtatatttcaggaaggttagaaagtggcggttaggatatattttaaatctacctaaagcagcatattttaaaaatttaaaagtattggtattaaattaagaaatagaggacagaactagactgatagcagtgacctagaacaatttgagattaggaaagttgtgaccatgaatttaaggatttatgtggatacaaattctcctttaaagtgtttcttcccttaatatttatctgacggtaatttttgagcagtgaattactttatatatcttaatagtttatttgggaccaaacacttaaacaaaaagttctttaagtcatataagccttttcaggaagcttgtctcatattcactcccgagacattcacctgccaagtggcctgaggatcaatccagtcctaggtttattttgcagacttacattctcccaagttattcagcctcatatgactccacggtcggctttaccaaaacagttcagagtgcactttggcacacaattgggaacagaacaatctaatgtgtggtttggtattccaagtggggtctttttcagaatctctgcactagtgtgagatgcaaacatgtttcctcatctttctggcttatccagtatgtagctatttgtgacataataaatatatacatatatgaaaata

SEQ ID NO: 422 - DNA, 3041 bp, Homo sapiens
  source 1..3041: mol_type = genomic DNA
ggcgacgaccagaaggggcccaagagagggggcgagcgaccgagcgccgcgacgcggaagtgagtgtggtgtaaaggaattcattagccatggatgtattcatgaaaggactttcaaaggccaaggagggagttgtggctgctgctgagaaaaccaaacagggtgtggcagaagcagcaggaaagacaaaagagggtgttctctatgtaggctccaaaaccaaggagggagtggtgcatggtgtggcaacagtggctgagaagaccaaagagcaagtgacaaatgttggaggagcagtggtgacgggtgtgacagcagtagcccagaagacagtggagggagcagggagcattgcagcagccactggctttgtcaaaaaggaccagttgggcaagaatgaagaaggagccccacaggaaggaattctggaagatatgcctgtggatcctgacaatgaggcttatgaaatgccttctgaggaagggtatcaagactacgaacctgaagcctaagaaatatctttgctcccagtttcttgagatctgctgacagatgttccatcctgtacaagtgctcagttccaatgtgcccagtcatgacatttctcaaagtttttacagtgtatctcgaagtcttccatcagcagtgattgaagtatctgtacctgcccccactcagcatttcggtgcttccctttcactgaagtgaatacatggtagcagggtctttgtgtgctgtggattttgtggcttcaatctacgatgttaaaacaaattaaaaacacctaagtgactaccacttatttctaaatcctcactatttttttgttgctgttgttcagaagttgttagtgatttgctatcatatattataagatttttaggtgtcttttaatgatactgtctaagaataatgacgtattgtgaaatttgttaatatatataatacttaaaaatatgtgagcatgaaactatgcacctataaatactaaatatgaaattttaccattttgcgatgtgttttattcacttgtgtttgtatataaatggtgagaattaaaataaaacgttatctcattgcaaaaatattttatttttatcccatctcactttaataataaaaatcatgcttataagcaacatgaattaagaactgacacaaaggacaaaaatataaagttattaatagccatttgaagaaggaggaattttagaagaggtagagaaaatggaacattaaccctacactcggaattccctgaagcaacactgccagaagtgtgttttggtatgcactggttccttaagtggctgtgattaattattgaaagtggggtgttgaagaccccaactactattgtagagtggtctatttctcccttcaatcctgtcaatgtttgctttacgtattttggggaactgttgtttgatgtgtatgtgtttataattgttatacatttttaattgagccttttattaacatatattgttatttttgtctcgaaataattttttagttaaaatctattttgtctgatattggtgtgaatgctgtacctttctgacaataaataatattcgaccatgaataaaaaaaaaaaaaaagtgggttcccgggaactaagcagtgtagaagatgattttgactacaccctccttagagagccataagacacattagcacatattagcacattcaaggctctgagagaatgtggttaactttgtttaactcagcattcctcactttttttttttaatcatcagaaattctctctctctctctctctttttctctcgctctctttttttttttttttttacaggaaatgcctttaaacatcgttggaactaccagagtcaccttaaaggagatcaattctctagactgataaaaatttcatggcctcctttaaatgttgccaaatatatgaattctaggatttttccttaggaaaggtttttctctttcagggaagatctattaactccccatgggtgctgaaaataaacttgatggtgaaaaactctgtataaattaatttaaaaattatttggtttctctttttaattattctggggcatagtcatttctaaaagtcactagtagaaagtataatttcaagacagaatattctagacatgctagcagtttatatgtattcatgagtaatgtgatatatattgggcgctggtgaggaaggaaggaggaatgagtgactataaggatggttaccatagaaacttccttttttacctaattgaagagagactactacagagtgctaagctgcatgtgtcatcttacactagagagaaatggtaagtttcttgttttatttaagttatgtttaagcaaggaaaggatttgttattgaacagtatatttcaggaaggttagaaagtggcggttaggatatattttaaatctacctaaagcagcatattttaaaaatttaaaagtattggtattaaattaagaaatagaggacagaactagactgatagcagtgacctagaacaatttgagattaggaaagttgtgaccatgaatttaaggatttatgtggatacaaattctcctttaaagtgtttcttcccttaatatttatctgacggtaatttttgagcagtgaattactttatatatcttaatagtttatttgggaccaaacacttaaacaaaaagttctttaagtcatataagccttttcaggaagcttgtctcatattcactcccgagacattcacctgccaagtggcctgaggatcaatccagtcctaggtttattttgcagacttacattctcccaagttattcagcctcatatgactccacggtcggctttaccaaaacagttcagagtgcactttggcacacaattgggaacagaacaatctaatgtgtggtttggtattccaagtggggtctttttcagaatctctgcactagtgtgagatgcaaacatgtttcctcatctttctggcttatccagtatgtagctatttgtgacataataaatatatacatatatgaaaata

SEQ ID NO: 423 - DNA, 3177 bp, Homo sapiens
  source 1..3177: mol_type = genomic DNA
ggcgacgaccagaaggggcccaagagagggggcgagcgaccgagcgccgcgacgcggaagtgaggtgcgtgcgggctgcagcgcagaccccggcccggcccctccgagagcgtcctgggcgctccctcacgccttgccttcaagccttctgcctttccaccctcgtgagcggagaactgggagtggccattcgacgacagtgtggtgtaaaggaattcattagccatggatgtattcatgaaaggactttcaaaggccaaggagggagttgtggctgctgctgagaaaaccaaacagggtgtggcagaagcagcaggaaagacaaaagagggtgttctctatgtaggctccaaaaccaaggagggagtggtgcatggtgtggcaacagtggctgagaagaccaaagagcaagtgacaaatgttggaggagcagtggtgacgggtgtgacagcagtagcccagaagacagtggagggagcagggagcattgcagcagccactggctttgtcaaaaaggaccagttgggcaagaatgaagaaggagccccacaggaaggaattctggaagatatgcctgtggatcctgacaatgaggcttatgaaatgccttctgaggaagggtatcaagactacgaacctgaagcctaagaaatatctttgctcccagtttcttgagatctgctgacagatgttccatcctgtacaagtgctcagttccaatgtgcccagtcatgacatttctcaaagtttttacagtgtatctcgaagtcttccatcagcagtgattgaagtatctgtacctgcccccactcagcatttcggtgcttccctttcactgaagtgaatacatggtagcagggtctttgtgtgctgtggattttgtggcttcaatctacgatgttaaaacaaattaaaaacacctaagtgactaccacttatttctaaatcctcactatttttttgttgctgttgttcagaagttgttagtgatttgctatcatatattataagatttttaggtgtcttttaatgatactgtctaagaataatgacgtattgtgaaatttgttaatatatataatacttaaaaatatgtgagcatgaaactatgcacctataaatactaaatatgaaattttaccattttgcgatgtgttttattcacttgtgtttgtatataaatggtgagaattaaaataaaacgttatctcattgcaaaaatattttatttttatcccatctcactttaataataaaaatcatgcttataagcaacatgaattaagaactgacacaaaggacaaaaatataaagttattaatagccatttgaagaaggaggaattttagaagaggtagagaaaatggaacattaaccctacactcggaattccctgaagcaacactgccagaagtgtgttttggtatgcactggttccttaagtggctgtgattaattattgaaagtggggtgttgaagaccccaactactattgtagagtggtctatttctcccttcaatcctgtcaatgtttgctttacgtattttggggaactgttgtttgatgtgtatgtgtttataattgttatacatttttaattgagccttttattaacatatattgttatttttgtctcgaaataattttttagttaaaatctattttgtctgatattggtgtgaatgctgtacctttctgacaataaataatattcgaccatgaataaaaaaaaaaaaaaagtgggttcccgggaactaagcagtgtagaagatgattttgactacaccctccttagagagccataagacacattagcacatattagcacattcaaggctctgagagaatgtggttaactttgtttaactcagcattcctcactttttttttttaatcatcagaaattctctctctctctctctctttttctctcgctctctttttttttttttttttacaggaaatgcctttaaacatcgttggaactaccagagtcaccttaaaggagatcaattctctagactgataaaaatttcatggcctcctttaaatgttgccaaatatatgaattctaggatttttccttaggaaaggtttttctctttcagggaagatctattaactccccatgggtgctgaaaataaacttgatggtgaaaaactctgtataaattaatttaaaaattatttggtttctctttttaattattctggggcatagtcatttctaaaagtcactagtagaaagtataatttcaagacagaatattctagacatgctagcagtttatatgtattcatgagtaatgtgatatatattgggcgctggtgaggaaggaaggaggaatgagtgactataaggatggttaccatagaaacttccttttttacctaattgaagagagactactacagagtgctaagctgcatgtgtcatcttacactagagagaaatggtaagtttcttgttttatttaagttatgtttaagcaaggaaaggatttgttattgaacagtatatttcaggaaggttagaaagtggcggttaggatatattttaaatctacctaaagcagcatattttaaaaatttaaaagtattggtattaaattaagaaatagaggacagaactagactgatagcagtgacctagaacaatttgagattaggaaagttgtgaccatgaatttaaggatttatgtggatacaaattctcctttaaagtgtttcttcccttaatatttatctgacggtaatttttgagcagtgaattactttatatatcttaatagtttatttgggaccaaacacttaaacaaaaagttctttaagtcatataagccttttcaggaagcttgtctcatattcactcccgagacattcacctgccaagtggcctgaggatcaatccagtcctaggtttattttgcagacttacattctcccaagttattcagcctcatatgactccacggtcggctttaccaaaacagttcagagtgcactttggcacacaattgggaacagaacaatctaatgtgtggtttggtattccaagtggggtctttttcagaatctctgcactagtgtgagatgcaaacatgtttcctcatctttctggcttatccagtatgtagctatttgtgacataataaatatatacatatatgaaaata

SEQ ID NO: 424 - DNA, 3312 bp, Homo sapiens
  source 1..3312: mol_type = genomic DNA
ggcgacgaccagaaggggcccaagagagggggcgagcgaccgagcgccgcgacgcggaagtgaggtgcgtgcgggctgcagcgcagaccccggcccggcccctccgagagcgtcctgggcgctccctcacgccttgccttcaagccttctgcctttccaccctcgtgagcggagaactgggagtggccattcgacgacaggttagcgggtttgcctcccactcccccagcctcgcgtcgccggctcacagcggcctcctctggggacagtcccccccgggtgccgcctccgcccttcctgtgcgctccttttccttcttctttcctattaaatattatttgggaattgtttaaattttttttttaaaaaaagagagaggcggggaggagtcggagttgtggagaagcagagggactcagtgtggtgtaaaggaattcattagccatggatgtattcatgaaaggactttcaaaggccaaggagggagttgtggctgctgctgagaaaaccaaacagggtgtggcagaagcagcaggaaagacaaaagagggtgttctctatgtaggctccaaaaccaaggagggagtggtgcatggtgtggcaacagtggctgagaagaccaaagagcaagtgacaaatgttggaggagcagtggtgacgggtgtgacagcagtagcccagaagacagtggagggagcagggagcattgcagcagccactggctttgtcaaaaaggaccagttgggcaaggaagggtatcaagactacgaacctgaagcctaagaaatatctttgctcccagtttcttgagatctgctgacagatgttccatcctgtacaagtgctcagttccaatgtgcccagtcatgacatttctcaaagtttttacagtgtatctcgaagtcttccatcagcagtgattgaagtatctgtacctgcccccactcagcatttcggtgcttccctttcactgaagtgaatacatggtagcagggtctttgtgtgctgtggattttgtggcttcaatctacgatgttaaaacaaattaaaaacacctaagtgactaccacttatttctaaatcctcactatttttttgttgctgttgttcagaagttgttagtgatttgctatcatatattataagatttttaggtgtcttttaatgatactgtctaagaataatgacgtattgtgaaatttgttaatatatataatacttaaaaatatgtgagcatgaaactatgcacctataaatactaaatatgaaattttaccattttgcgatgtgttttattcacttgtgtttgtatataaatggtgagaattaaaataaaacgttatctcattgcaaaaatattttatttttatcccatctcactttaataataaaaatcatgcttataagcaacatgaattaagaactgacacaaaggacaaaaatataaagttattaatagccatttgaagaaggaggaattttagaagaggtagagaaaatggaacattaaccctacactcggaattccctgaagcaacactgccagaagtgtgttttggtatgcactggttccttaagtggctgtgattaattattgaaagtggggtgttgaagaccccaactactattgtagagtggtctatttctcccttcaatcctgtcaatgtttgctttacgtattttggggaactgttgtttgatgtgtatgtgtttataattgttatacatttttaattgagccttttattaacatatattgttatttttgtctcgaaataattttttagttaaaatctattttgtctgatattggtgtgaatgctgtacctttctgacaataaataatattcgaccatgaataaaaaaaaaaaaaaagtgggttcccgggaactaagcagtgtagaagatgattttgactacaccctccttagagagccataagacacattagcacatattagcacattcaaggctctgagagaatgtggttaactttgtttaactcagcattcctcactttttttttttaatcatcagaaattctctctctctctctctctttttctctcgctctctttttttttttttttttacaggaaatgcctttaaacatcgttggaactaccagagtcaccttaaaggagatcaattctctagactgataaaaatttcatggcctcctttaaatgttgccaaatatatgaattctaggatttttccttaggaaaggtttttctctttcagggaagatctattaactccccatgggtgctgaaaataaacttgatggtgaaaaactctgtataaattaatttaaaaattatttggtttctctttttaattattctggggcatagtcatttctaaaagtcactagtagaaagtataatttcaagacagaatattctagacatgctagcagtttatatgtattcatgagtaatgtgatatatattgggcgctggtgaggaaggaaggaggaatgagtgactataaggatggttaccatagaaacttccttttttacctaattgaagagagactactacagagtgctaagctgcatgtgtcatcttacactagagagaaatggtaagtttcttgttttatttaagttatgtttaagcaaggaaaggatttgttattgaacagtatatttcaggaaggttagaaagtggcggttaggatatattttaaatctacctaaagcagcatattttaaaaatttaaaagtattggtattaaattaagaaatagaggacagaactagactgatagcagtgacctagaacaatttgagattaggaaagttgtgaccatgaatttaaggatttatgtggatacaaattctcctttaaagtgtttcttcccttaatatttatctgacggtaatttttgagcagtgaattactttatatatcttaatagtttatttgggaccaaacacttaaacaaaaagttctttaagtcatataagccttttcaggaagcttgtctcatattcactcccgagacattcacctgccaagtggcctgaggatcaatccagtcctaggtttattttgcagacttacattctcccaagttattcagcctcatatgactccacggtcggctttaccaaaacagttcagagtgcactttggcacacaattgggaacagaacaatctaatgtgtggtttggtattccaagtggggtctttttcagaatctctgcactagtgtgagatgcaaacatgtttcctcatctttctggcttatccagtatgtagctatttgtgacataataaatatatacatatatgaaaata

SEQ ID NO: 425 - DNA, 3396 bp, Homo sapiens
  source 1..3396: mol_type = genomic DNA
ggcgacgaccagaaggggcccaagagagggggcgagcgaccgagcgccgcgacgcggaagtgaggtgcgtgcgggctgcagcgcagaccccggcccggcccctccgagagcgtcctgggcgctccctcacgccttgccttcaagccttctgcctttccaccctcgtgagcggagaactgggagtggccattcgacgacaggttagcgggtttgcctcccactcccccagcctcgcgtcgccggctcacagcggcctcctctggggacagtcccccccgggtgccgcctccgcccttcctgtgcgctccttttccttcttctttcctattaaatattatttgggaattgtttaaattttttttttaaaaaaagagagaggcggggaggagtcggagttgtggagaagcagagggactcagtgtggtgtaaaggaattcattagccatggatgtattcatgaaaggactttcaaaggccaaggagggagttgtggctgctgctgagaaaaccaaacagggtgtggcagaagcagcaggaaagacaaaagagggtgttctctatgtaggctccaaaaccaaggagggagtggtgcatggtgtggcaacagtggctgagaagaccaaagagcaagtgacaaatgttggaggagcagtggtgacgggtgtgacagcagtagcccagaagacagtggagggagcagggagcattgcagcagccactggctttgtcaaaaaggaccagttgggcaagaatgaagaaggagccccacaggaaggaattctggaagatatgcctgtggatcctgacaatgaggcttatgaaatgccttctgaggaagggtatcaagactacgaacctgaagcctaagaaatatctttgctcccagtttcttgagatctgctgacagatgttccatcctgtacaagtgctcagttccaatgtgcccagtcatgacatttctcaaagtttttacagtgtatctcgaagtcttccatcagcagtgattgaagtatctgtacctgcccccactcagcatttcggtgcttccctttcactgaagtgaatacatggtagcagggtctttgtgtgctgtggattttgtggcttcaatctacgatgttaaaacaaattaaaaacacctaagtgactaccacttatttctaaatcctcactatttttttgttgctgttgttcagaagttgttagtgatttgctatcatatattataagatttttaggtgtcttttaatgatactgtctaagaataatgacgtattgtgaaatttgttaatatatataatacttaaaaatatgtgagcatgaaactatgcacctataaatactaaatatgaaattttaccattttgcgatgtgttttattcacttgtgtttgtatataaatggtgagaattaaaataaaacgttatctcattgcaaaaatattttatttttatcccatctcactttaataataaaaatcatgcttataagcaacatgaattaagaactgacacaaaggacaaaaatataaagttattaatagccatttgaagaaggaggaattttagaagaggtagagaaaatggaacattaaccctacactcggaattccctgaagcaacactgccagaagtgtgttttggtatgcactggttccttaagtggctgtgattaattattgaaagtggggtgttgaagaccccaactactattgtagagtggtctatttctcccttcaatcctgtcaatgtttgctttacgtattttggggaactgttgtttgatgtgtatgtgtttataattgttatacatttttaattgagccttttattaacatatattgttatttttgtctcgaaataattttttagttaaaatctattttgtctgatattggtgtgaatgctgtacctttctgacaataaataatattcgaccatgaataaaaaaaaaaaaaaagtgggttcccgggaactaagcagtgtagaagatgattttgactacaccctccttagagagccataagacacattagcacatattagcacattcaaggctctgagagaatgtggttaactttgtttaactcagcattcctcactttttttttttaatcatcagaaattctctctctctctctctctttttctctcgctctctttttttttttttttttacaggaaatgcctttaaacatcgttggaactaccagagtcaccttaaaggagatcaattctctagactgataaaaatttcatggcctcctttaaatgttgccaaatatatgaattctaggatttttccttaggaaaggtttttctctttcagggaagatctattaactccccatgggtgctgaaaataaacttgatggtgaaaaactctgtataaattaatttaaaaattatttggtttctctttttaattattctggggcatagtcatttctaaaagtcactagtagaaagtataatttcaagacagaatattctagacatgctagcagtttatatgtattcatgagtaatgtgatatatattgggcgctggtgaggaaggaaggaggaatgagtgactataaggatggttaccatagaaacttccttttttacctaattgaagagagactactacagagtgctaagctgcatgtgtcatcttacactagagagaaatggtaagtttcttgttttatttaagttatgtttaagcaaggaaaggatttgttattgaacagtatatttcaggaaggttagaaagtggcggttaggatatattttaaatctacctaaagcagcatattttaaaaatttaaaagtattggtattaaattaagaaatagaggacagaactagactgatagcagtgacctagaacaatttgagattaggaaagttgtgaccatgaatttaaggatttatgtggatacaaattctcctttaaagtgtttcttcccttaatatttatctgacggtaatttttgagcagtgaattactttatatatcttaatagtttatttgggaccaaacacttaaacaaaaagttctttaagtcatataagccttttcaggaagcttgtctcatattcactcccgagacattcacctgccaagtggcctgaggatcaatccagtcctaggtttattttgcagacttacattctcccaagttattcagcctcatatgactccacggtcggctttaccaaaacagttcagagtgcactttggcacacaattgggaacagaacaatctaatgtgtggtttggtattccaagtggggtctttttcagaatctctgcactagtgtgagatgcaaacatgtttcctcatctttctggcttatccagtatgtagctatttgtgacataataaatatatacatatatgaaaata

SEQ ID NO: 426 - DNA, 3465 bp, Homo sapiens
  source 1..3465: mol_type = genomic DNA
ggcgacgaccagaaggggcccaagagagggggcgagcgaccgagcgccgcgacgcggaagtgaggtgcgtgcgggctgcagcgcagaccccggcccggcccctccgagagcgtcctgggcgctccctcacgccttgccttcaagccttctgcctttccaccctcgtgagcggagaactgggagtggccattcgacgacaggttagcgggtttgcctcccactcccccagcctcgcgtcgccggctcacagcggcctcctctggggacagtcccccccgggtgccgcctccgcccttcctgtgcgctccttttccttcttctttcctattaaatattatttgggaattgtttaaattttttttttaaaaaaagagagaggcggggaggagtcggagttgtggagaagcagagggactcagggctgagagattaggctgcttctccgggatccgcttttccccgggaaacgcgaggatgctccatggagctgtggtgtaaaggaattcattagccatggatgtattcatgaaaggactttcaaaggccaaggagggagttgtggctgctgctgagaaaaccaaacagggtgtggcagaagcagcaggaaagacaaaagagggtgttctctatgtaggctccaaaaccaaggagggagtggtgcatggtgtggcaacagtggctgagaagaccaaagagcaagtgacaaatgttggaggagcagtggtgacgggtgtgacagcagtagcccagaagacagtggagggagcagggagcattgcagcagccactggctttgtcaaaaaggaccagttgggcaagaatgaagaaggagccccacaggaaggaattctggaagatatgcctgtggatcctgacaatgaggcttatgaaatgccttctgaggaagggtatcaagactacgaacctgaagcctaagaaatatctttgctcccagtttcttgagatctgctgacagatgttccatcctgtacaagtgctcagttccaatgtgcccagtcatgacatttctcaaagtttttacagtgtatctcgaagtcttccatcagcagtgattgaagtatctgtacctgcccccactcagcatttcggtgcttccctttcactgaagtgaatacatggtagcagggtctttgtgtgctgtggattttgtggcttcaatctacgatgttaaaacaaattaaaaacacctaagtgactaccacttatttctaaatcctcactatttttttgttgctgttgttcagaagttgttagtgatttgctatcatatattataagatttttaggtgtcttttaatgatactgtctaagaataatgacgtattgtgaaatttgttaatatatataatacttaaaaatatgtgagcatgaaactatgcacctataaatactaaatatgaaattttaccattttgcgatgtgttttattcacttgtgtttgtatataaatggtgagaattaaaataaaacgttatctcattgcaaaaatattttatttttatcccatctcactttaataataaaaatcatgcttataagcaacatgaattaagaactgacacaaaggacaaaaatataaagttattaatagccatttgaagaaggaggaattttagaagaggtagagaaaatggaacattaaccctacactcggaattccctgaagcaacactgccagaagtgtgttttggtatgcactggttccttaagtggctgtgattaattattgaaagtggggtgttgaagaccccaactactattgtagagtggtctatttctcccttcaatcctgtcaatgtttgctttacgtattttggggaactgttgtttgatgtgtatgtgtttataattgttatacatttttaattgagccttttattaacatatattgttatttttgtctcgaaataattttttagttaaaatctattttgtctgatattggtgtgaatgctgtacctttctgacaataaataatattcgaccatgaataaaaaaaaaaaaaaagtgggttcccgggaactaagcagtgtagaagatgattttgactacaccctccttagagagccataagacacattagcacatattagcacattcaaggctctgagagaatgtggttaactttgtttaactcagcattcctcactttttttttttaatcatcagaaattctctctctctctctctctttttctctcgctctctttttttttttttttttacaggaaatgcctttaaacatcgttggaactaccagagtcaccttaaaggagatcaattctctagactgataaaaatttcatggcctcctttaaatgttgccaaatatatgaattctaggatttttccttaggaaaggtttttctctttcagggaagatctattaactccccatgggtgctgaaaataaacttgatggtgaaaaactctgtataaattaatttaaaaattatttggtttctctttttaattattctggggcatagtcatttctaaaagtcactagtagaaagtataatttcaagacagaatattctagacatgctagcagtttatatgtattcatgagtaatgtgatatatattgggcgctggtgaggaaggaaggaggaatgagtgactataaggatggttaccatagaaacttccttttttacctaattgaagagagactactacagagtgctaagctgcatgtgtcatcttacactagagagaaatggtaagtttcttgttttatttaagttatgtttaagcaaggaaaggatttgttattgaacagtatatttcaggaaggttagaaagtggcggttaggatatattttaaatctacctaaagcagcatattttaaaaatttaaaagtattggtattaaattaagaaatagaggacagaactagactgatagcagtgacctagaacaatttgagattaggaaagttgtgaccatgaatttaaggatttatgtggatacaaattctcctttaaagtgtttcttcccttaatatttatctgacggtaatttttgagcagtgaattactttatatatcttaatagtttatttgggaccaaacacttaaacaaaaagttctttaagtcatataagccttttcaggaagcttgtctcatattcactcccgagacattcacctgccaagtggcctgaggatcaatccagtcctaggtttattttgcagacttacattctcccaagttattcagcctcatatgactccacggtcggctttaccaaaacagttcagagtgcactttggcacacaattgggaacagaacaatctaatgtgtggtttggtattccaagtggggtctttttcagaatctctgcactagtgtgagatgcaaacatgtttcctcatctttctggcttatccagtatgtagctatttgtgacataataaatatatacatatatgaaaata

SEQ ID NO: 427 - DNA, 3091 bp, Homo sapiens
  source 1..3091: mol_type = genomic DNA
gagtgtgagcggcgcctgctcagggtagatagctgagggcgggggtggatgttggatggattagaaccatcacacttgggcctgctgtttgcctgagtttgaaccacaccccgatgtggtgtaaaggaattcattagccatggatgtattcatgaaaggactttcaaaggccaaggagggagttgtggctgctgctgagaaaaccaaacagggtgtggcagaagcagcaggaaagacaaaagagggtgttctctatgtaggctccaaaaccaaggagggagtggtgcatggtgtggcaacagtggctgagaagaccaaagagcaagtgacaaatgttggaggagcagtggtgacgggtgtgacagcagtagcccagaagacagtggagggagcagggagcattgcagcagccactggctttgtcaaaaaggaccagttgggcaagaatgaagaaggagccccacaggaaggaattctggaagatatgcctgtggatcctgacaatgaggcttatgaaatgccttctgaggaagggtatcaagactacgaacctgaagcctaagaaatatctttgctcccagtttcttgagatctgctgacagatgttccatcctgtacaagtgctcagttccaatgtgcccagtcatgacatttctcaaagtttttacagtgtatctcgaagtcttccatcagcagtgattgaagtatctgtacctgcccccactcagcatttcggtgcttccctttcactgaagtgaatacatggtagcagggtctttgtgtgctgtggattttgtggcttcaatctacgatgttaaaacaaattaaaaacacctaagtgactaccacttatttctaaatcctcactatttttttgttgctgttgttcagaagttgttagtgatttgctatcatatattataagatttttaggtgtcttttaatgatactgtctaagaataatgacgtattgtgaaatttgttaatatatataatacttaaaaatatgtgagcatgaaactatgcacctataaatactaaatatgaaattttaccattttgcgatgtgttttattcacttgtgtttgtatataaatggtgagaattaaaataaaacgttatctcattgcaaaaatattttatttttatcccatctcactttaataataaaaatcatgcttataagcaacatgaattaagaactgacacaaaggacaaaaatataaagttattaatagccatttgaagaaggaggaattttagaagaggtagagaaaatggaacattaaccctacactcggaattccctgaagcaacactgccagaagtgtgttttggtatgcactggttccttaagtggctgtgattaattattgaaagtggggtgttgaagaccccaactactattgtagagtggtctatttctcccttcaatcctgtcaatgtttgctttacgtattttggggaactgttgtttgatgtgtatgtgtttataattgttatacatttttaattgagccttttattaacatatattgttatttttgtctcgaaataattttttagttaaaatctattttgtctgatattggtgtgaatgctgtacctttctgacaataaataatattcgaccatgaataaaaaaaaaaaaaaagtgggttcccgggaactaagcagtgtagaagatgattttgactacaccctccttagagagccataagacacattagcacatattagcacattcaaggctctgagagaatgtggttaactttgtttaactcagcattcctcactttttttttttaatcatcagaaattctctctctctctctctctttttctctcgctctctttttttttttttttttacaggaaatgcctttaaacatcgttggaactaccagagtcaccttaaaggagatcaattctctagactgataaaaatttcatggcctcctttaaatgttgccaaatatatgaattctaggatttttccttaggaaaggtttttctctttcagggaagatctattaactccccatgggtgctgaaaataaacttgatggtgaaaaactctgtataaattaatttaaaaattatttggtttctctttttaattattctggggcatagtcatttctaaaagtcactagtagaaagtataatttcaagacagaatattctagacatgctagcagtttatatgtattcatgagtaatgtgatatatattgggcgctggtgaggaaggaaggaggaatgagtgactataaggatggttaccatagaaacttccttttttacctaattgaagagagactactacagagtgctaagctgcatgtgtcatcttacactagagagaaatggtaagtttcttgttttatttaagttatgtttaagcaaggaaaggatttgttattgaacagtatatttcaggaaggttagaaagtggcggttaggatatattttaaatctacctaaagcagcatattttaaaaatttaaaagtattggtattaaattaagaaatagaggacagaactagactgatagcagtgacctagaacaatttgagattaggaaagttgtgaccatgaatttaaggatttatgtggatacaaattctcctttaaagtgtttcttcccttaatatttatctgacggtaatttttgagcagtgaattactttatatatcttaatagtttatttgggaccaaacacttaaacaaaaagttctttaagtcatataagccttttcaggaagcttgtctcatattcactcccgagacattcacctgccaagtggcctgaggatcaatccagtcctaggtttattttgcagacttacattctcccaagttattcagcctcatatgactccacggtcggctttaccaaaacagttcagagtgcactttggcacacaattgggaacagaacaatctaatgtgtggtttggtattccaagtggggtctttttcagaatctctgcactagtgtgagatgcaaacatgtttcctcatctttctggcttatccagtatgtagctatttgtgacataataaatatatacatatatgaaaata

SEQ ID NO: 428 - DNA, 2984 bp, Homo sapiens
  source 1..2984: mol_type = genomic DNA
gctctaattctctgcaccttctcaagcattgtgcagattggttttctggattatcagcctgaaggacaaaacgaagaaacagccattagctcctgtctcccattgtctgagagctgccactaggatattaacttcctgaaattctgcagaaatctcctcttactttggcactggagatgcccatacgcagaaagcaaaaaggcacagcatatttaaggaagctcataagaaacagtgcatccagaagtggcgagaattggaggaatggacatgagactctaagaaccagcgcctttgatgttccttttgatctgttatgtagctcttcttgtacacagaatgaagaaggagccccacaggaaggaattctggaagatatgcctgtggatcctgacaatgaggcttatgaaatgccttctgaggaagggtatcaagactacgaacctgaagcctaagaaatatctttgctcccagtttcttgagatctgctgacagatgttccatcctgtacaagtgctcagttccaatgtgcccagtcatgacatttctcaaagtttttacagtgtatctcgaagtcttccatcagcagtgattgaagtatctgtacctgcccccactcagcatttcggtgcttccctttcactgaagtgaatacatggtagcagggtctttgtgtgctgtggattttgtggcttcaatctacgatgttaaaacaaattaaaaacacctaagtgactaccacttatttctaaatcctcactatttttttgttgctgttgttcagaagttgttagtgatttgctatcatatattataagatttttaggtgtcttttaatgatactgtctaagaataatgacgtattgtgaaatttgttaatatatataatacttaaaaatatgtgagcatgaaactatgcacctataaatactaaatatgaaattttaccattttgcgatgtgttttattcacttgtgtttgtatataaatggtgagaattaaaataaaacgttatctcattgcaaaaatattttatttttatcccatctcactttaataataaaaatcatgcttataagcaacatgaattaagaactgacacaaaggacaaaaatataaagttattaatagccatttgaagaaggaggaattttagaagaggtagagaaaatggaacattaaccctacactcggaattccctgaagcaacactgccagaagtgtgttttggtatgcactggttccttaagtggctgtgattaattattgaaagtggggtgttgaagaccccaactactattgtagagtggtctatttctcccttcaatcctgtcaatgtttgctttacgtattttggggaactgttgtttgatgtgtatgtgtttataattgttatacatttttaattgagccttttattaacatatattgttatttttgtctcgaaataattttttagttaaaatctattttgtctgatattggtgtgaatgctgtacctttctgacaataaataatattcgaccatgaataaaaaaaaaaaaaaagtgggttcccgggaactaagcagtgtagaagatgattttgactacaccctccttagagagccataagacacattagcacatattagcacattcaaggctctgagagaatgtggttaactttgtttaactcagcattcctcactttttttttttaatcatcagaaattctctctctctctctctctttttctctcgctctctttttttttttttttttacaggaaatgcctttaaacatcgttggaactaccagagtcaccttaaaggagatcaattctctagactgataaaaatttcatggcctcctttaaatgttgccaaatatatgaattctaggatttttccttaggaaaggtttttctctttcagggaagatctattaactccccatgggtgctgaaaataaacttgatggtgaaaaactctgtataaattaatttaaaaattatttggtttctctttttaattattctggggcatagtcatttctaaaagtcactagtagaaagtataatttcaagacagaatattctagacatgctagcagtttatatgtattcatgagtaatgtgatatatattgggcgctggtgaggaaggaaggaggaatgagtgactataaggatggttaccatagaaacttccttttttacctaattgaagagagactactacagagtgctaagctgcatgtgtcatcttacactagagagaaatggtaagtttcttgttttatttaagttatgtttaagcaaggaaaggatttgttattgaacagtatatttcaggaaggttagaaagtggcggttaggatatattttaaatctacctaaagcagcatattttaaaaatttaaaagtattggtattaaattaagaaatagaggacagaactagactgatagcagtgacctagaacaatttgagattaggaaagttgtgaccatgaatttaaggatttatgtggatacaaattctcctttaaagtgtttcttcccttaatatttatctgacggtaatttttgagcagtgaattactttatatatcttaatagtttatttgggaccaaacacttaaacaaaaagttctttaagtcatataagccttttcaggaagcttgtctcatattcactcccgagacattcacctgccaagtggcctgaggatcaatccagtcctaggtttattttgcagacttacattctcccaagttattcagcctcatatgactccacggtcggctttaccaaaacagttcagagtgcactttggcacacaattgggaacagaacaatctaatgtgtggtttggtattccaagtggggtctttttcagaatctctgcactagtgtgagatgcaaacatgtttcctcatctttctggcttatccagtatgtagctatttgtgacataataaatatatacatatatgaaaata

SEQ ID NO: 429 - DNA, 6160 bp, Homo sapiens
  source 1..6160: mol_type = genomic DNA
gcttctccattctggtgtgatccaggaacagctgtcttccagctctgaaagagtgtggtgtaaaggaattcattagccatggatgtattcatgaaaggactttcaaaggccaaggagggagttgtggctgctgctgagaaaaccaaacagggtgtggcagaagcagcaggaaagacaaaagagggtgttctctatgtaggctccaaaaccaaggagggagtggtgcatggtgtggcaacagtggctgagaagaccaaagagcaagtgacaaatgttggaggagcagtggtgacgggtgtgacagcagtagcccagaagacagtggagggagcagggagcattgcagcagccactggctttgtcaaaaaggaccagttgggcaagaagcatccaaaatacaaaccatctaagaggcaagaaaatgtcgtgatgttcctagtgcaagttaaaaagatttgctttcctcaagtcggaaagcccttctcatttttgaggtttttttcttcttttttttttcaagtgaaagcattttggaggagtcaatatccatctttaaaggtagccaggtcacatgtatacatatgtaactaacctgcacaatgtgcacatgtaccctaaaacttaaagtataatttaaaaaaaaagaatttaaataaaaaaagaaaatcagagagaaaaaaaaaaagatgcatgtgcaccctgatactaccatccatagtgatacggtttggctttgtgtccccacccaaatctcatcttgaattgtaacccccatgtgttgagggagggaccttatgggaggtgattggatcatgggggtagtttctccatgctgttctcatgatagtgaatgagttctcataagatctaatggtttaaaatcatggcacttccttttgctctctctttctcctgccatgtgaggtgtgccttgcttccccttccccttctgctatgattgtaagtttcctgaggcctcctcagctatgcagaacggtgagtcaattaaacttctttctttataaaaaaaaaaaaaaaaaaaaaggtagccaggtaaaaattacttgtttccaggacattttcacctgaaagaagcattgtcatataacatagaagcaagaaatccagtagtgggggttatttaaaaatagctggaaaatttcaatcagcatgagtttgaagcaacaatttatcatcaccttttatggtgggtggggttaagaacatttcagcgggcaaagtggtggtgatggggaagagacaccaggggaggtgattcccattgcattgctttgtaaacagaggcacaggttcttcatttttgtcacacaaaatcacagctatgcagaatttattaatttattcttctgagacaagaaaaaagccaccaaaggaaaccaacagcttgctcctctcacactgggggaaccatatgagagacttatctatccctgactttaattttgacctgaggagagctcctcttaaggaaaacaaattaattcaatgactatactacttaatcattgacctttatttaataagagatttttccataggatatgctgagctgtctcacttacatcagttgtgtctcctgaggtgggtgacaggagaccacaaatattgcatagcacacaaatcgttaatagcagctgtataccaaaccattacctaaatatgtagagtacaattcattctcactaatgtcagagagcatgctataaaatggtgaatccggacagctgaagatactgaataataacctctattttgaacaagtttacagtgttccaatcagtaattaaattgatacctgatgaatatatgtgtgtgtatgtattcatagcagagatggttttcctgagataaggattttgttattcggataggctgctgctggaattgtccttctacccttgtttctttgtccttagtcatcactcatacctctttccactcttctgccatcacttttgtcaccaaagtcatggtcctttccccgccgattgctgctgcaggtctagggcaccaagacttaggcagcactcaccatgtgccaagaactggaccacaggtaccatccagcattgctcatggagactctgtccctttctgtaggacaccctccttttagctagcaacccctccaccacctagagcctctggacctctcattttaatattaagaactaggaaaacttaccgctgagaataactagtacaactagaactggtagagaaatctgggtctcttgggaatggatttttaggctttattgattagaggtgtattaataatgcagtgttatagtttcatgacataacgaataaaaaagttcattttggacttgcctttcagctccctaggagctaaaagacgtatttaatgtaacttgtgtggtggaaataagttcttttttcaggcaaaagatgtgcaaacccatctggggaagaaacattaaaaactaaggagacagtgtcctagataactatgttcttttcctgttttagtctaaaataatgattagttttcttatatatcttcatttgtcttggttccttttagcccaatttaataatattattgcagatattgatgaaaacctttaccttcctcttaattcatcaaagtacttgataaaatttatacatagtacattaattgggaggtttttatgagattaattaatataatgaactgatgttgaaattatttaaaacctgaattattattgtattaagtaggacacttaatacagttaatcagttctgtctttattcatttgtgagaatttttggcaagctattgtgaatattcagggaagggaatgtatttttagcaggaatcttatacctcctacatagaaatgaagcatttactgaaacatccatgaaacaaaatgtttctgaatgtgtactatacacttgttataagccccttttcttctgtagctatattttggagaaaaatctttgctttgacaaaaaaaattatgttgacttacacatatattttataactaagcagtgtttggtttgtgataaaggatacaaaaatataaaaatgttcagcacacgtaagtaaggccttgttgacagtgtgagttatgctactggatactcaaaaggaacattcagtgttctcaggtggtctctagactgtctcaagcctaggaagatattttataagcaaaggaataagagaaggaagattcagatttaatccaagtgaagaattcagttttgtgtgccttatcctgttattttgagaggcagccaaaagatgctggtcagcaaggagaattgtaagttgggcagccaactctgatttctcaacctcttagctgttttcttaaactcagaatttttaatgaatttaaatgtccatatcaggtagactttggggatgcttttaccagtgattttcagaatgttactttctggcatttcttttcacgtagcattatattaaaaatgaattcattcatccaccttcccttgtccttactaattttccctcctactcccttcccccttgttcttgccatggggacatgcaaacactggtggttgatgtctgagcaaggctgctgacagggggaggaaggagatgtcaagcagaggtcaatggcagtgtgcccagcagcctaggaagtaggagggaaaagagagagagacagagatggtggatgaaagagaaagccaggatgattatggtggttatgatacttgtcatgctgaacacccaattgagcacccaataagcacataataatttaatcatcctctggcttggatggcagtgttctatcagtgttgacttcctggttgtgacagttttacagtgttagtgtagaagagaatccttgctttagagaggtacttactgaagtacttagggttaatgcaccattgtgctggaaaaagatacgcacacacacgcacacacacacacacacacactctcacacacacgcacaaatacatccatgtgttaggcagagggagcaaatgaggtaaaatgttaacaattaggaattctgggtgaagtggatagagggactctttgactgttcttgaaacttctctatacatttgatctgtttcaaattcttcagaaaatcaaactacaaaaacttaattcatttagtgaacatctactgaacatctgtatattaaatagtgttaaatgaatgtcaattaaaatgctcaaacacagtagaggttgattctcattcacataagtccatggtaggtgtttttggcaggtgggtgagtttctcccttagggagattgaggaacccagactcctcccaagttgcagccccaccgtcttctgaggggatgcatccatacccacttcgaagtagcatacattatttcctttctcattcctttggataccagccacaatttattcaaggtagacagaaaattgtagtatatagccatatgccctgacaaagaagggagaacagattttggtggacaactagcaaactctgatacaatctgttattaagcactgtgtgtggatagatgctaactagaaggagattatcttcccttcagcaaatataaactgaatgccgtttatttggttgaaactaagctagatcatgggagtatagaaattttataagaagacatagtcacttctgtcagtgagctcaagaagaattagtatgcggaatgtaatcatacctacagggggcttgtgccacttaagtaaaatgaaacattattttgagtacaatttagcaataaatgtactacgagatcattaaaaatcatgtttgaatgttattgtgtcaaggatgggaaaaagacttttgggttgtagacttgataattatagttaaaaacagtttttattcttgtttagtcttattttttatgtttaaacatatttatacttgctaacatttatacttgctaagtaaagactgtttttacaaccatgacaagaacaaaacatattagtaatgcaaatgccacatttcctacaatcaactaatcacactaacatatttgcatggaagaatcactgggattgatctggccacgtgtgtagtcatgcccaaaatgtgaagtccatctgttttgcaattttttttaaccactgttatccaaatgctccttggattttttttattagtggatatattttggaggtcagacaccctcttggctagatcatcacctttataacaaatatatatactattctcatggaaatatatttagacattgccctactgggaatttttttcaagtaattaatgtacagcttgtgcaacagcttgatcttggcttcatggaaataattcactcttagcagcatctaatgccacaaagcatttatggatgtcagctcagaacttacttttatttatctctgagttacttttttttttttttttttgagacagagtctcactctgtctttggcttgtccctaacctcttaacagacttaatattaagctccatttcactcagtcgttctgttgtcatataaatgagacattctacaagcatagtttttagtttctgccagagcatcatacaacattgtgagctatgatgaagataaagacctagagaagatatttaatatgaagttcattatctaatatttggtatgtgtggcaaaatagcaatctactgcttggttctgctgtaatctatttacccacccatcccatctttctttcaatttaaaaggataatgattttagtcacgattatacataaacccattaccataggcaataaacaatggggcaaaccattggtcccatagttggagtgtggtctgaagtgtgttttggtggagagagatctatgtctggagatagctaacatggatttggatcccagatctgctcctacctgttgctgtgcctgtgaccaaatcatgtgatctctctggtttcagtttacttgtgaataaagtaaataccttcatcaacacctgtttttgaatacaatgtttttctgtaatttttgcttcttataatgttataatgatcatccttacatctaaatcttggtttacattttcatcaattcttttggaaagattggagaagtaaattttggagatgtatgtcggctattaaaaatgtttaattttttaattaaaaattaaaac

SEQ ID NO: 430 - DNA, 6171 bp, Homo sapiens
  source 1..6171: mol_type = genomic DNA
ggcgacgaccagaaggggcccaagagagggggcgagcgaccgagcgccgcgacgcggaagtgagtgtggtgtaaaggaattcattagccatggatgtattcatgaaaggactttcaaaggccaaggagggagttgtggctgctgctgagaaaaccaaacagggtgtggcagaagcagcaggaaagacaaaagagggtgttctctatgtaggctccaaaaccaaggagggagtggtgcatggtgtggcaacagtggctgagaagaccaaagagcaagtgacaaatgttggaggagcagtggtgacgggtgtgacagcagtagcccagaagacagtggagggagcagggagcattgcagcagccactggctttgtcaaaaaggaccagttgggcaagaagcatccaaaatacaaaccatctaagaggcaagaaaatgtcgtgatgttcctagtgcaagttaaaaagatttgctttcctcaagtcggaaagcccttctcatttttgaggtttttttcttcttttttttttcaagtgaaagcattttggaggagtcaatatccatctttaaaggtagccaggtcacatgtatacatatgtaactaacctgcacaatgtgcacatgtaccctaaaacttaaagtataatttaaaaaaaaagaatttaaataaaaaaagaaaatcagagagaaaaaaaaaaagatgcatgtgcaccctgatactaccatccatagtgatacggtttggctttgtgtccccacccaaatctcatcttgaattgtaacccccatgtgttgagggagggaccttatgggaggtgattggatcatgggggtagtttctccatgctgttctcatgatagtgaatgagttctcataagatctaatggtttaaaatcatggcacttccttttgctctctctttctcctgccatgtgaggtgtgccttgcttccccttccccttctgctatgattgtaagtttcctgaggcctcctcagctatgcagaacggtgagtcaattaaacttctttctttataaaaaaaaaaaaaaaaaaaaaggtagccaggtaaaaattacttgtttccaggacattttcacctgaaagaagcattgtcatataacatagaagcaagaaatccagtagtgggggttatttaaaaatagctggaaaatttcaatcagcatgagtttgaagcaacaatttatcatcaccttttatggtgggtggggttaagaacatttcagcgggcaaagtggtggtgatggggaagagacaccaggggaggtgattcccattgcattgctttgtaaacagaggcacaggttcttcatttttgtcacacaaaatcacagctatgcagaatttattaatttattcttctgagacaagaaaaaagccaccaaaggaaaccaacagcttgctcctctcacactgggggaaccatatgagagacttatctatccctgactttaattttgacctgaggagagctcctcttaaggaaaacaaattaattcaatgactatactacttaatcattgacctttatttaataagagatttttccataggatatgctgagctgtctcacttacatcagttgtgtctcctgaggtgggtgacaggagaccacaaatattgcatagcacacaaatcgttaatagcagctgtataccaaaccattacctaaatatgtagagtacaattcattctcactaatgtcagagagcatgctataaaatggtgaatccggacagctgaagatactgaataataacctctattttgaacaagtttacagtgttccaatcagtaattaaattgatacctgatgaatatatgtgtgtgtatgtattcatagcagagatggttttcctgagataaggattttgttattcggataggctgctgctggaattgtccttctacccttgtttctttgtccttagtcatcactcatacctctttccactcttctgccatcacttttgtcaccaaagtcatggtcctttccccgccgattgctgctgcaggtctagggcaccaagacttaggcagcactcaccatgtgccaagaactggaccacaggtaccatccagcattgctcatggagactctgtccctttctgtaggacaccctccttttagctagcaacccctccaccacctagagcctctggacctctcattttaatattaagaactaggaaaacttaccgctgagaataactagtacaactagaactggtagagaaatctgggtctcttgggaatggatttttaggctttattgattagaggtgtattaataatgcagtgttatagtttcatgacataacgaataaaaaagttcattttggacttgcctttcagctccctaggagctaaaagacgtatttaatgtaacttgtgtggtggaaataagttcttttttcaggcaaaagatgtgcaaacccatctggggaagaaacattaaaaactaaggagacagtgtcctagataactatgttcttttcctgttttagtctaaaataatgattagttttcttatatatcttcatttgtcttggttccttttagcccaatttaataatattattgcagatattgatgaaaacctttaccttcctcttaattcatcaaagtacttgataaaatttatacatagtacattaattgggaggtttttatgagattaattaatataatgaactgatgttgaaattatttaaaacctgaattattattgtattaagtaggacacttaatacagttaatcagttctgtctttattcatttgtgagaatttttggcaagctattgtgaatattcagggaagggaatgtatttttagcaggaatcttatacctcctacatagaaatgaagcatttactgaaacatccatgaaacaaaatgtttctgaatgtgtactatacacttgttataagccccttttcttctgtagctatattttggagaaaaatctttgctttgacaaaaaaaattatgttgacttacacatatattttataactaagcagtgtttggtttgtgataaaggatacaaaaatataaaaatgttcagcacacgtaagtaaggccttgttgacagtgtgagttatgctactggatactcaaaaggaacattcagtgttctcaggtggtctctagactgtctcaagcctaggaagatattttataagcaaaggaataagagaaggaagattcagatttaatccaagtgaagaattcagttttgtgtgccttatcctgttattttgagaggcagccaaaagatgctggtcagcaaggagaattgtaagttgggcagccaactctgatttctcaacctcttagctgttttcttaaactcagaatttttaatgaatttaaatgtccatatcaggtagactttggggatgcttttaccagtgattttcagaatgttactttctggcatttcttttcacgtagcattatattaaaaatgaattcattcatccaccttcccttgtccttactaattttccctcctactcccttcccccttgttcttgccatggggacatgcaaacactggtggttgatgtctgagcaaggctgctgacagggggaggaaggagatgtcaagcagaggtcaatggcagtgtgcccagcagcctaggaagtaggagggaaaagagagagagacagagatggtggatgaaagagaaagccaggatgattatggtggttatgatacttgtcatgctgaacacccaattgagcacccaataagcacataataatttaatcatcctctggcttggatggcagtgttctatcagtgttgacttcctggttgtgacagttttacagtgttagtgtagaagagaatccttgctttagagaggtacttactgaagtacttagggttaatgcaccattgtgctggaaaaagatacgcacacacacgcacacacacacacacacacactctcacacacacgcacaaatacatccatgtgttaggcagagggagcaaatgaggtaaaatgttaacaattaggaattctgggtgaagtggatagagggactctttgactgttcttgaaacttctctatacatttgatctgtttcaaattcttcagaaaatcaaactacaaaaacttaattcatttagtgaacatctactgaacatctgtatattaaatagtgttaaatgaatgtcaattaaaatgctcaaacacagtagaggttgattctcattcacataagtccatggtaggtgtttttggcaggtgggtgagtttctcccttagggagattgaggaacccagactcctcccaagttgcagccccaccgtcttctgaggggatgcatccatacccacttcgaagtagcatacattatttcctttctcattcctttggataccagccacaatttattcaaggtagacagaaaattgtagtatatagccatatgccctgacaaagaagggagaacagattttggtggacaactagcaaactctgatacaatctgttattaagcactgtgtgtggatagatgctaactagaaggagattatcttcccttcagcaaatataaactgaatgccgtttatttggttgaaactaagctagatcatgggagtatagaaattttataagaagacatagtcacttctgtcagtgagctcaagaagaattagtatgcggaatgtaatcatacctacagggggcttgtgccacttaagtaaaatgaaacattattttgagtacaatttagcaataaatgtactacgagatcattaaaaatcatgtttgaatgttattgtgtcaaggatgggaaaaagacttttgggttgtagacttgataattatagttaaaaacagtttttattcttgtttagtcttattttttatgtttaaacatatttatacttgctaacatttatacttgctaagtaaagactgtttttacaaccatgacaagaacaaaacatattagtaatgcaaatgccacatttcctacaatcaactaatcacactaacatatttgcatggaagaatcactgggattgatctggccacgtgtgtagtcatgcccaaaatgtgaagtccatctgttttgcaattttttttaaccactgttatccaaatgctccttggattttttttattagtggatatattttggaggtcagacaccctcttggctagatcatcacctttataacaaatatatatactattctcatggaaatatatttagacattgccctactgggaatttttttcaagtaattaatgtacagcttgtgcaacagcttgatcttggcttcatggaaataattcactcttagcagcatctaatgccacaaagcatttatggatgtcagctcagaacttacttttatttatctctgagttacttttttttttttttttttgagacagagtctcactctgtctttggcttgtccctaacctcttaacagacttaatattaagctccatttcactcagtcgttctgttgtcatataaatgagacattctacaagcatagtttttagtttctgccagagcatcatacaacattgtgagctatgatgaagataaagacctagagaagatatttaatatgaagttcattatctaatatttggtatgtgtggcaaaatagcaatctactgcttggttctgctgtaatctatttacccacccatcccatctttctttcaatttaaaaggataatgattttagtcacgattatacataaacccattaccataggcaataaacaatggggcaaaccattggtcccatagttggagtgtggtctgaagtgtgttttggtggagagagatctatgtctggagatagctaacatggatttggatcccagatctgctcctacctgttgctgtgcctgtgaccaaatcatgtgatctctctggtttcagtttacttgtgaataaagtaaataccttcatcaacacctgtttttgaatacaatgtttttctgtaatttttgcttcttataatgttataatgatcatccttacatctaaatcttggtttacattttcatcaattcttttggaaagattggagaagtaaattttggagatgtatgtcggctattaaaaatgtttaattttttaattaaaaattaaaac

SEQ ID NO: 431 - DNA, 6307 bp, Homo sapiens
  source 1..6307: mol_type = genomic DNA
ggcgacgaccagaaggggcccaagagagggggcgagcgaccgagcgccgcgacgcggaagtgaggtgcgtgcgggctgcagcgcagaccccggcccggcccctccgagagcgtcctgggcgctccctcacgccttgccttcaagccttctgcctttccaccctcgtgagcggagaactgggagtggccattcgacgacagtgtggtgtaaaggaattcattagccatggatgtattcatgaaaggactttcaaaggccaaggagggagttgtggctgctgctgagaaaaccaaacagggtgtggcagaagcagcaggaaagacaaaagagggtgttctctatgtaggctccaaaaccaaggagggagtggtgcatggtgtggcaacagtggctgagaagaccaaagagcaagtgacaaatgttggaggagcagtggtgacgggtgtgacagcagtagcccagaagacagtggagggagcagggagcattgcagcagccactggctttgtcaaaaaggaccagttgggcaagaagcatccaaaatacaaaccatctaagaggcaagaaaatgtcgtgatgttcctagtgcaagttaaaaagatttgctttcctcaagtcggaaagcccttctcatttttgaggtttttttcttcttttttttttcaagtgaaagcattttggaggagtcaatatccatctttaaaggtagccaggtcacatgtatacatatgtaactaacctgcacaatgtgcacatgtaccctaaaacttaaagtataatttaaaaaaaaagaatttaaataaaaaaagaaaatcagagagaaaaaaaaaaagatgcatgtgcaccctgatactaccatccatagtgatacggtttggctttgtgtccccacccaaatctcatcttgaattgtaacccccatgtgttgagggagggaccttatgggaggtgattggatcatgggggtagtttctccatgctgttctcatgatagtgaatgagttctcataagatctaatggtttaaaatcatggcacttccttttgctctctctttctcctgccatgtgaggtgtgccttgcttccccttccccttctgctatgattgtaagtttcctgaggcctcctcagctatgcagaacggtgagtcaattaaacttctttctttataaaaaaaaaaaaaaaaaaaaaggtagccaggtaaaaattacttgtttccaggacattttcacctgaaagaagcattgtcatataacatagaagcaagaaatccagtagtgggggttatttaaaaatagctggaaaatttcaatcagcatgagtttgaagcaacaatttatcatcaccttttatggtgggtggggttaagaacatttcagcgggcaaagtggtggtgatggggaagagacaccaggggaggtgattcccattgcattgctttgtaaacagaggcacaggttcttcatttttgtcacacaaaatcacagctatgcagaatttattaatttattcttctgagacaagaaaaaagccaccaaaggaaaccaacagcttgctcctctcacactgggggaaccatatgagagacttatctatccctgactttaattttgacctgaggagagctcctcttaaggaaaacaaattaattcaatgactatactacttaatcattgacctttatttaataagagatttttccataggatatgctgagctgtctcacttacatcagttgtgtctcctgaggtgggtgacaggagaccacaaatattgcatagcacacaaatcgttaatagcagctgtataccaaaccattacctaaatatgtagagtacaattcattctcactaatgtcagagagcatgctataaaatggtgaatccggacagctgaagatactgaataataacctctattttgaacaagtttacagtgttccaatcagtaattaaattgatacctgatgaatatatgtgtgtgtatgtattcatagcagagatggttttcctgagataaggattttgttattcggataggctgctgctggaattgtccttctacccttgtttctttgtccttagtcatcactcatacctctttccactcttctgccatcacttttgtcaccaaagtcatggtcctttccccgccgattgctgctgcaggtctagggcaccaagacttaggcagcactcaccatgtgccaagaactggaccacaggtaccatccagcattgctcatggagactctgtccctttctgtaggacaccctccttttagctagcaacccctccaccacctagagcctctggacctctcattttaatattaagaactaggaaaacttaccgctgagaataactagtacaactagaactggtagagaaatctgggtctcttgggaatggatttttaggctttattgattagaggtgtattaataatgcagtgttatagtttcatgacataacgaataaaaaagttcattttggacttgcctttcagctccctaggagctaaaagacgtatttaatgtaacttgtgtggtggaaataagttcttttttcaggcaaaagatgtgcaaacccatctggggaagaaacattaaaaactaaggagacagtgtcctagataactatgttcttttcctgttttagtctaaaataatgattagttttcttatatatcttcatttgtcttggttccttttagcccaatttaataatattattgcagatattgatgaaaacctttaccttcctcttaattcatcaaagtacttgataaaatttatacatagtacattaattgggaggtttttatgagattaattaatataatgaactgatgttgaaattatttaaaacctgaattattattgtattaagtaggacacttaatacagttaatcagttctgtctttattcatttgtgagaatttttggcaagctattgtgaatattcagggaagggaatgtatttttagcaggaatcttatacctcctacatagaaatgaagcatttactgaaacatccatgaaacaaaatgtttctgaatgtgtactatacacttgttataagccccttttcttctgtagctatattttggagaaaaatctttgctttgacaaaaaaaattatgttgacttacacatatattttataactaagcagtgtttggtttgtgataaaggatacaaaaatataaaaatgttcagcacacgtaagtaaggccttgttgacagtgtgagttatgctactggatactcaaaaggaacattcagtgttctcaggtggtctctagactgtctcaagcctaggaagatattttataagcaaaggaataagagaaggaagattcagatttaatccaagtgaagaattcagttttgtgtgccttatcctgttattttgagaggcagccaaaagatgctggtcagcaaggagaattgtaagttgggcagccaactctgatttctcaacctcttagctgttttcttaaactcagaatttttaatgaatttaaatgtccatatcaggtagactttggggatgcttttaccagtgattttcagaatgttactttctggcatttcttttcacgtagcattatattaaaaatgaattcattcatccaccttcccttgtccttactaattttccctcctactcccttcccccttgttcttgccatggggacatgcaaacactggtggttgatgtctgagcaaggctgctgacagggggaggaaggagatgtcaagcagaggtcaatggcagtgtgcccagcagcctaggaagtaggagggaaaagagagagagacagagatggtggatgaaagagaaagccaggatgattatggtggttatgatacttgtcatgctgaacacccaattgagcacccaataagcacataataatttaatcatcctctggcttggatggcagtgttctatcagtgttgacttcctggttgtgacagttttacagtgttagtgtagaagagaatccttgctttagagaggtacttactgaagtacttagggttaatgcaccattgtgctggaaaaagatacgcacacacacgcacacacacacacacacacactctcacacacacgcacaaatacatccatgtgttaggcagagggagcaaatgaggtaaaatgttaacaattaggaattctgggtgaagtggatagagggactctttgactgttcttgaaacttctctatacatttgatctgtttcaaattcttcagaaaatcaaactacaaaaacttaattcatttagtgaacatctactgaacatctgtatattaaatagtgttaaatgaatgtcaattaaaatgctcaaacacagtagaggttgattctcattcacataagtccatggtaggtgtttttggcaggtgggtgagtttctcccttagggagattgaggaacccagactcctcccaagttgcagccccaccgtcttctgaggggatgcatccatacccacttcgaagtagcatacattatttcctttctcattcctttggataccagccacaatttattcaaggtagacagaaaattgtagtatatagccatatgccctgacaaagaagggagaacagattttggtggacaactagcaaactctgatacaatctgttattaagcactgtgtgtggatagatgctaactagaaggagattatcttcccttcagcaaatataaactgaatgccgtttatttggttgaaactaagctagatcatgggagtatagaaattttataagaagacatagtcacttctgtcagtgagctcaagaagaattagtatgcggaatgtaatcatacctacagggggcttgtgccacttaagtaaaatgaaacattattttgagtacaatttagcaataaatgtactacgagatcattaaaaatcatgtttgaatgttattgtgtcaaggatgggaaaaagacttttgggttgtagacttgataattatagttaaaaacagtttttattcttgtttagtcttattttttatgtttaaacatatttatacttgctaacatttatacttgctaagtaaagactgtttttacaaccatgacaagaacaaaacatattagtaatgcaaatgccacatttcctacaatcaactaatcacactaacatatttgcatggaagaatcactgggattgatctggccacgtgtgtagtcatgcccaaaatgtgaagtccatctgttttgcaattttttttaaccactgttatccaaatgctccttggattttttttattagtggatatattttggaggtcagacaccctcttggctagatcatcacctttataacaaatatatatactattctcatggaaatatatttagacattgccctactgggaatttttttcaagtaattaatgtacagcttgtgcaacagcttgatcttggcttcatggaaataattcactcttagcagcatctaatgccacaaagcatttatggatgtcagctcagaacttacttttatttatctctgagttacttttttttttttttttttgagacagagtctcactctgtctttggcttgtccctaacctcttaacagacttaatattaagctccatttcactcagtcgttctgttgtcatataaatgagacattctacaagcatagtttttagtttctgccagagcatcatacaacattgtgagctatgatgaagataaagacctagagaagatatttaatatgaagttcattatctaatatttggtatgtgtggcaaaatagcaatctactgcttggttctgctgtaatctatttacccacccatcccatctttctttcaatttaaaaggataatgattttagtcacgattatacataaacccattaccataggcaataaacaatggggcaaaccattggtcccatagttggagtgtggtctgaagtgtgttttggtggagagagatctatgtctggagatagctaacatggatttggatcccagatctgctcctacctgttgctgtgcctgtgaccaaatcatgtgatctctctggtttcagtttacttgtgaataaagtaaataccttcatcaacacctgtttttgaatacaatgtttttctgtaatttttgcttcttataatgttataatgatcatccttacatctaaatcttggtttacattttcatcaattcttttggaaagattggagaagtaaattttggagatgtatgtcggctattaaaaatgtttaattttttaattaaaaattaaaac

SEQ ID NO: 432 - DNA, 6526 bp, Homo sapiens
  source 1..6526: mol_type = genomic DNA
ggcgacgaccagaaggggcccaagagagggggcgagcgaccgagcgccgcgacgcggaagtgaggtgcgtgcgggctgcagcgcagaccccggcccggcccctccgagagcgtcctgggcgctccctcacgccttgccttcaagccttctgcctttccaccctcgtgagcggagaactgggagtggccattcgacgacaggttagcgggtttgcctcccactcccccagcctcgcgtcgccggctcacagcggcctcctctggggacagtcccccccgggtgccgcctccgcccttcctgtgcgctccttttccttcttctttcctattaaatattatttgggaattgtttaaattttttttttaaaaaaagagagaggcggggaggagtcggagttgtggagaagcagagggactcagtgtggtgtaaaggaattcattagccatggatgtattcatgaaaggactttcaaaggccaaggagggagttgtggctgctgctgagaaaaccaaacagggtgtggcagaagcagcaggaaagacaaaagagggtgttctctatgtaggctccaaaaccaaggagggagtggtgcatggtgtggcaacagtggctgagaagaccaaagagcaagtgacaaatgttggaggagcagtggtgacgggtgtgacagcagtagcccagaagacagtggagggagcagggagcattgcagcagccactggctttgtcaaaaaggaccagttgggcaagaagcatccaaaatacaaaccatctaagaggcaagaaaatgtcgtgatgttcctagtgcaagttaaaaagatttgctttcctcaagtcggaaagcccttctcatttttgaggtttttttcttcttttttttttcaagtgaaagcattttggaggagtcaatatccatctttaaaggtagccaggtcacatgtatacatatgtaactaacctgcacaatgtgcacatgtaccctaaaacttaaagtataatttaaaaaaaaagaatttaaataaaaaaagaaaatcagagagaaaaaaaaaaagatgcatgtgcaccctgatactaccatccatagtgatacggtttggctttgtgtccccacccaaatctcatcttgaattgtaacccccatgtgttgagggagggaccttatgggaggtgattggatcatgggggtagtttctccatgctgttctcatgatagtgaatgagttctcataagatctaatggtttaaaatcatggcacttccttttgctctctctttctcctgccatgtgaggtgtgccttgcttccccttccccttctgctatgattgtaagtttcctgaggcctcctcagctatgcagaacggtgagtcaattaaacttctttctttataaaaaaaaaaaaaaaaaaaaaggtagccaggtaaaaattacttgtttccaggacattttcacctgaaagaagcattgtcatataacatagaagcaagaaatccagtagtgggggttatttaaaaatagctggaaaatttcaatcagcatgagtttgaagcaacaatttatcatcaccttttatggtgggtggggttaagaacatttcagcgggcaaagtggtggtgatggggaagagacaccaggggaggtgattcccattgcattgctttgtaaacagaggcacaggttcttcatttttgtcacacaaaatcacagctatgcagaatttattaatttattcttctgagacaagaaaaaagccaccaaaggaaaccaacagcttgctcctctcacactgggggaaccatatgagagacttatctatccctgactttaattttgacctgaggagagctcctcttaaggaaaacaaattaattcaatgactatactacttaatcattgacctttatttaataagagatttttccataggatatgctgagctgtctcacttacatcagttgtgtctcctgaggtgggtgacaggagaccacaaatattgcatagcacacaaatcgttaatagcagctgtataccaaaccattacctaaatatgtagagtacaattcattctcactaatgtcagagagcatgctataaaatggtgaatccggacagctgaagatactgaataataacctctattttgaacaagtttacagtgttccaatcagtaattaaattgatacctgatgaatatatgtgtgtgtatgtattcatagcagagatggttttcctgagataaggattttgttattcggataggctgctgctggaattgtccttctacccttgtttctttgtccttagtcatcactcatacctctttccactcttctgccatcacttttgtcaccaaagtcatggtcctttccccgccgattgctgctgcaggtctagggcaccaagacttaggcagcactcaccatgtgccaagaactggaccacaggtaccatccagcattgctcatggagactctgtccctttctgtaggacaccctccttttagctagcaacccctccaccacctagagcctctggacctctcattttaatattaagaactaggaaaacttaccgctgagaataactagtacaactagaactggtagagaaatctgggtctcttgggaatggatttttaggctttattgattagaggtgtattaataatgcagtgttatagtttcatgacataacgaataaaaaagttcattttggacttgcctttcagctccctaggagctaaaagacgtatttaatgtaacttgtgtggtggaaataagttcttttttcaggcaaaagatgtgcaaacccatctggggaagaaacattaaaaactaaggagacagtgtcctagataactatgttcttttcctgttttagtctaaaataatgattagttttcttatatatcttcatttgtcttggttccttttagcccaatttaataatattattgcagatattgatgaaaacctttaccttcctcttaattcatcaaagtacttgataaaatttatacatagtacattaattgggaggtttttatgagattaattaatataatgaactgatgttgaaattatttaaaacctgaattattattgtattaagtaggacacttaatacagttaatcagttctgtctttattcatttgtgagaatttttggcaagctattgtgaatattcagggaagggaatgtatttttagcaggaatcttatacctcctacatagaaatgaagcatttactgaaacatccatgaaacaaaatgtttctgaatgtgtactatacacttgttataagccccttttcttctgtagctatattttggagaaaaatctttgctttgacaaaaaaaattatgttgacttacacatatattttataactaagcagtgtttggtttgtgataaaggatacaaaaatataaaaatgttcagcacacgtaagtaaggccttgttgacagtgtgagttatgctactggatactcaaaaggaacattcagtgttctcaggtggtctctagactgtctcaagcctaggaagatattttataagcaaaggaataagagaaggaagattcagatttaatccaagtgaagaattcagttttgtgtgccttatcctgttattttgagaggcagccaaaagatgctggtcagcaaggagaattgtaagttgggcagccaactctgatttctcaacctcttagctgttttcttaaactcagaatttttaatgaatttaaatgtccatatcaggtagactttggggatgcttttaccagtgattttcagaatgttactttctggcatttcttttcacgtagcattatattaaaaatgaattcattcatccaccttcccttgtccttactaattttccctcctactcccttcccccttgttcttgccatggggacatgcaaacactggtggttgatgtctgagcaaggctgctgacagggggaggaaggagatgtcaagcagaggtcaatggcagtgtgcccagcagcctaggaagtaggagggaaaagagagagagacagagatggtggatgaaagagaaagccaggatgattatggtggttatgatacttgtcatgctgaacacccaattgagcacccaataagcacataataatttaatcatcctctggcttggatggcagtgttctatcagtgttgacttcctggttgtgacagttttacagtgttagtgtagaagagaatccttgctttagagaggtacttactgaagtacttagggttaatgcaccattgtgctggaaaaagatacgcacacacacgcacacacacacacacacacactctcacacacacgcacaaatacatccatgtgttaggcagagggagcaaatgaggtaaaatgttaacaattaggaattctgggtgaagtggatagagggactctttgactgttcttgaaacttctctatacatttgatctgtttcaaattcttcagaaaatcaaactacaaaaacttaattcatttagtgaacatctactgaacatctgtatattaaatagtgttaaatgaatgtcaattaaaatgctcaaacacagtagaggttgattctcattcacataagtccatggtaggtgtttttggcaggtgggtgagtttctcccttagggagattgaggaacccagactcctcccaagttgcagccccaccgtcttctgaggggatgcatccatacccacttcgaagtagcatacattatttcctttctcattcctttggataccagccacaatttattcaaggtagacagaaaattgtagtatatagccatatgccctgacaaagaagggagaacagattttggtggacaactagcaaactctgatacaatctgttattaagcactgtgtgtggatagatgctaactagaaggagattatcttcccttcagcaaatataaactgaatgccgtttatttggttgaaactaagctagatcatgggagtatagaaattttataagaagacatagtcacttctgtcagtgagctcaagaagaattagtatgcggaatgtaatcatacctacagggggcttgtgccacttaagtaaaatgaaacattattttgagtacaatttagcaataaatgtactacgagatcattaaaaatcatgtttgaatgttattgtgtcaaggatgggaaaaagacttttgggttgtagacttgataattatagttaaaaacagtttttattcttgtttagtcttattttttatgtttaaacatatttatacttgctaacatttatacttgctaagtaaagactgtttttacaaccatgacaagaacaaaacatattagtaatgcaaatgccacatttcctacaatcaactaatcacactaacatatttgcatggaagaatcactgggattgatctggccacgtgtgtagtcatgcccaaaatgtgaagtccatctgttttgcaattttttttaaccactgttatccaaatgctccttggattttttttattagtggatatattttggaggtcagacaccctcttggctagatcatcacctttataacaaatatatatactattctcatggaaatatatttagacattgccctactgggaatttttttcaagtaattaatgtacagcttgtgcaacagcttgatcttggcttcatggaaataattcactcttagcagcatctaatgccacaaagcatttatggatgtcagctcagaacttacttttatttatctctgagttacttttttttttttttttttgagacagagtctcactctgtctttggcttgtccctaacctcttaacagacttaatattaagctccatttcactcagtcgttctgttgtcatataaatgagacattctacaagcatagtttttagtttctgccagagcatcatacaacattgtgagctatgatgaagataaagacctagagaagatatttaatatgaagttcattatctaatatttggtatgtgtggcaaaatagcaatctactgcttggttctgctgtaatctatttacccacccatcccatctttctttcaatttaaaaggataatgattttagtcacgattatacataaacccattaccataggcaataaacaatggggcaaaccattggtcccatagttggagtgtggtctgaagtgtgttttggtggagagagatctatgtctggagatagctaacatggatttggatcccagatctgctcctacctgttgctgtgcctgtgaccaaatcatgtgatctctctggtttcagtttacttgtgaataaagtaaataccttcatcaacacctgtttttgaatacaatgtttttctgtaatttttgcttcttataatgttataatgatcatccttacatctaaatcttggtttacattttcatcaattcttttggaaagattggagaagtaaattttggagatgtatgtcggctattaaaaatgtttaattttttaattaaaaattaaaac

SEQ ID NO: 433 - DNA, 6176 bp, Homo sapiens
  source 1..6176: mol_type = genomic DNA
ggctgagagattaggctgcttctccgggatccgcttttccccgggaaacgcgaggatgctccatggagctgtggtgtaaaggaattcattagccatggatgtattcatgaaaggactttcaaaggccaaggagggagttgtggctgctgctgagaaaaccaaacagggtgtggcagaagcagcaggaaagacaaaagagggtgttctctatgtaggctccaaaaccaaggagggagtggtgcatggtgtggcaacagtggctgagaagaccaaagagcaagtgacaaatgttggaggagcagtggtgacgggtgtgacagcagtagcccagaagacagtggagggagcagggagcattgcagcagccactggctttgtcaaaaaggaccagttgggcaagaagcatccaaaatacaaaccatctaagaggcaagaaaatgtcgtgatgttcctagtgcaagttaaaaagatttgctttcctcaagtcggaaagcccttctcatttttgaggtttttttcttcttttttttttcaagtgaaagcattttggaggagtcaatatccatctttaaaggtagccaggtcacatgtatacatatgtaactaacctgcacaatgtgcacatgtaccctaaaacttaaagtataatttaaaaaaaaagaatttaaataaaaaaagaaaatcagagagaaaaaaaaaaagatgcatgtgcaccctgatactaccatccatagtgatacggtttggctttgtgtccccacccaaatctcatcttgaattgtaacccccatgtgttgagggagggaccttatgggaggtgattggatcatgggggtagtttctccatgctgttctcatgatagtgaatgagttctcataagatctaatggtttaaaatcatggcacttccttttgctctctctttctcctgccatgtgaggtgtgccttgcttccccttccccttctgctatgattgtaagtttcctgaggcctcctcagctatgcagaacggtgagtcaattaaacttctttctttataaaaaaaaaaaaaaaaaaaaaggtagccaggtaaaaattacttgtttccaggacattttcacctgaaagaagcattgtcatataacatagaagcaagaaatccagtagtgggggttatttaaaaatagctggaaaatttcaatcagcatgagtttgaagcaacaatttatcatcaccttttatggtgggtggggttaagaacatttcagcgggcaaagtggtggtgatggggaagagacaccaggggaggtgattcccattgcattgctttgtaaacagaggcacaggttcttcatttttgtcacacaaaatcacagctatgcagaatttattaatttattcttctgagacaagaaaaaagccaccaaaggaaaccaacagcttgctcctctcacactgggggaaccatatgagagacttatctatccctgactttaattttgacctgaggagagctcctcttaaggaaaacaaattaattcaatgactatactacttaatcattgacctttatttaataagagatttttccataggatatgctgagctgtctcacttacatcagttgtgtctcctgaggtgggtgacaggagaccacaaatattgcatagcacacaaatcgttaatagcagctgtataccaaaccattacctaaatatgtagagtacaattcattctcactaatgtcagagagcatgctataaaatggtgaatccggacagctgaagatactgaataataacctctattttgaacaagtttacagtgttccaatcagtaattaaattgatacctgatgaatatatgtgtgtgtatgtattcatagcagagatggttttcctgagataaggattttgttattcggataggctgctgctggaattgtccttctacccttgtttctttgtccttagtcatcactcatacctctttccactcttctgccatcacttttgtcaccaaagtcatggtcctttccccgccgattgctgctgcaggtctagggcaccaagacttaggcagcactcaccatgtgccaagaactggaccacaggtaccatccagcattgctcatggagactctgtccctttctgtaggacaccctccttttagctagcaacccctccaccacctagagcctctggacctctcattttaatattaagaactaggaaaacttaccgctgagaataactagtacaactagaactggtagagaaatctgggtctcttgggaatggatttttaggctttattgattagaggtgtattaataatgcagtgttatagtttcatgacataacgaataaaaaagttcattttggacttgcctttcagctccctaggagctaaaagacgtatttaatgtaacttgtgtggtggaaataagttcttttttcaggcaaaagatgtgcaaacccatctggggaagaaacattaaaaactaaggagacagtgtcctagataactatgttcttttcctgttttagtctaaaataatgattagttttcttatatatcttcatttgtcttggttccttttagcccaatttaataatattattgcagatattgatgaaaacctttaccttcctcttaattcatcaaagtacttgataaaatttatacatagtacattaattgggaggtttttatgagattaattaatataatgaactgatgttgaaattatttaaaacctgaattattattgtattaagtaggacacttaatacagttaatcagttctgtctttattcatttgtgagaatttttggcaagctattgtgaatattcagggaagggaatgtatttttagcaggaatcttatacctcctacatagaaatgaagcatttactgaaacatccatgaaacaaaatgtttctgaatgtgtactatacacttgttataagccccttttcttctgtagctatattttggagaaaaatctttgctttgacaaaaaaaattatgttgacttacacatatattttataactaagcagtgtttggtttgtgataaaggatacaaaaatataaaaatgttcagcacacgtaagtaaggccttgttgacagtgtgagttatgctactggatactcaaaaggaacattcagtgttctcaggtggtctctagactgtctcaagcctaggaagatattttataagcaaaggaataagagaaggaagattcagatttaatccaagtgaagaattcagttttgtgtgccttatcctgttattttgagaggcagccaaaagatgctggtcagcaaggagaattgtaagttgggcagccaactctgatttctcaacctcttagctgttttcttaaactcagaatttttaatgaatttaaatgtccatatcaggtagactttggggatgcttttaccagtgattttcagaatgttactttctggcatttcttttcacgtagcattatattaaaaatgaattcattcatccaccttcccttgtccttactaattttccctcctactcccttcccccttgttcttgccatggggacatgcaaacactggtggttgatgtctgagcaaggctgctgacagggggaggaaggagatgtcaagcagaggtcaatggcagtgtgcccagcagcctaggaagtaggagggaaaagagagagagacagagatggtggatgaaagagaaagccaggatgattatggtggttatgatacttgtcatgctgaacacccaattgagcacccaataagcacataataatttaatcatcctctggcttggatggcagtgttctatcagtgttgacttcctggttgtgacagttttacagtgttagtgtagaagagaatccttgctttagagaggtacttactgaagtacttagggttaatgcaccattgtgctggaaaaagatacgcacacacacgcacacacacacacacacacactctcacacacacgcacaaatacatccatgtgttaggcagagggagcaaatgaggtaaaatgttaacaattaggaattctgggtgaagtggatagagggactctttgactgttcttgaaacttctctatacatttgatctgtttcaaattcttcagaaaatcaaactacaaaaacttaattcatttagtgaacatctactgaacatctgtatattaaatagtgttaaatgaatgtcaattaaaatgctcaaacacagtagaggttgattctcattcacataagtccatggtaggtgtttttggcaggtgggtgagtttctcccttagggagattgaggaacccagactcctcccaagttgcagccccaccgtcttctgaggggatgcatccatacccacttcgaagtagcatacattatttcctttctcattcctttggataccagccacaatttattcaaggtagacagaaaattgtagtatatagccatatgccctgacaaagaagggagaacagattttggtggacaactagcaaactctgatacaatctgttattaagcactgtgtgtggatagatgctaactagaaggagattatcttcccttcagcaaatataaactgaatgccgtttatttggttgaaactaagctagatcatgggagtatagaaattttataagaagacatagtcacttctgtcagtgagctcaagaagaattagtatgcggaatgtaatcatacctacagggggcttgtgccacttaagtaaaatgaaacattattttgagtacaatttagcaataaatgtactacgagatcattaaaaatcatgtttgaatgttattgtgtcaaggatgggaaaaagacttttgggttgtagacttgataattatagttaaaaacagtttttattcttgtttagtcttattttttatgtttaaacatatttatacttgctaacatttatacttgctaagtaaagactgtttttacaaccatgacaagaacaaaacatattagtaatgcaaatgccacatttcctacaatcaactaatcacactaacatatttgcatggaagaatcactgggattgatctggccacgtgtgtagtcatgcccaaaatgtgaagtccatctgttttgcaattttttttaaccactgttatccaaatgctccttggattttttttattagtggatatattttggaggtcagacaccctcttggctagatcatcacctttataacaaatatatatactattctcatggaaatatatttagacattgccctactgggaatttttttcaagtaattaatgtacagcttgtgcaacagcttgatcttggcttcatggaaataattcactcttagcagcatctaatgccacaaagcatttatggatgtcagctcagaacttacttttatttatctctgagttacttttttttttttttttttgagacagagtctcactctgtctttggcttgtccctaacctcttaacagacttaatattaagctccatttcactcagtcgttctgttgtcatataaatgagacattctacaagcatagtttttagtttctgccagagcatcatacaacattgtgagctatgatgaagataaagacctagagaagatatttaatatgaagttcattatctaatatttggtatgtgtggcaaaatagcaatctactgcttggttctgctgtaatctatttacccacccatcccatctttctttcaatttaaaaggataatgattttagtcacgattatacataaacccattaccataggcaataaacaatggggcaaaccattggtcccatagttggagtgtggtctgaagtgtgttttggtggagagagatctatgtctggagatagctaacatggatttggatcccagatctgctcctacctgttgctgtgcctgtgaccaaatcatgtgatctctctggtttcagtttacttgtgaataaagtaaataccttcatcaacacctgtttttgaatacaatgtttttctgtaatttttgcttcttataatgttataatgatcatccttacatctaaatcttggtttacattttcatcaattcttttggaaagattggagaagtaaattttggagatgtatgtcggctattaaaaatgtttaattttttaattaaaaattaaaac

SEQ ID NO: 434 - DNA, 6221 bp, Homo sapiens
  source 1..6221: mol_type = genomic DNA
gagtgtgagcggcgcctgctcagggtagatagctgagggcgggggtggatgttggatggattagaaccatcacacttgggcctgctgtttgcctgagtttgaaccacaccccgatgtggtgtaaaggaattcattagccatggatgtattcatgaaaggactttcaaaggccaaggagggagttgtggctgctgctgagaaaaccaaacagggtgtggcagaagcagcaggaaagacaaaagagggtgttctctatgtaggctccaaaaccaaggagggagtggtgcatggtgtggcaacagtggctgagaagaccaaagagcaagtgacaaatgttggaggagcagtggtgacgggtgtgacagcagtagcccagaagacagtggagggagcagggagcattgcagcagccactggctttgtcaaaaaggaccagttgggcaagaagcatccaaaatacaaaccatctaagaggcaagaaaatgtcgtgatgttcctagtgcaagttaaaaagatttgctttcctcaagtcggaaagcccttctcatttttgaggtttttttcttcttttttttttcaagtgaaagcattttggaggagtcaatatccatctttaaaggtagccaggtcacatgtatacatatgtaactaacctgcacaatgtgcacatgtaccctaaaacttaaagtataatttaaaaaaaaagaatttaaataaaaaaagaaaatcagagagaaaaaaaaaaagatgcatgtgcaccctgatactaccatccatagtgatacggtttggctttgtgtccccacccaaatctcatcttgaattgtaacccccatgtgttgagggagggaccttatgggaggtgattggatcatgggggtagtttctccatgctgttctcatgatagtgaatgagttctcataagatctaatggtttaaaatcatggcacttccttttgctctctctttctcctgccatgtgaggtgtgccttgcttccccttccccttctgctatgattgtaagtttcctgaggcctcctcagctatgcagaacggtgagtcaattaaacttctttctttataaaaaaaaaaaaaaaaaaaaaggtagccaggtaaaaattacttgtttccaggacattttcacctgaaagaagcattgtcatataacatagaagcaagaaatccagtagtgggggttatttaaaaatagctggaaaatttcaatcagcatgagtttgaagcaacaatttatcatcaccttttatggtgggtggggttaagaacatttcagcgggcaaagtggtggtgatggggaagagacaccaggggaggtgattcccattgcattgctttgtaaacagaggcacaggttcttcatttttgtcacacaaaatcacagctatgcagaatttattaatttattcttctgagacaagaaaaaagccaccaaaggaaaccaacagcttgctcctctcacactgggggaaccatatgagagacttatctatccctgactttaattttgacctgaggagagctcctcttaaggaaaacaaattaattcaatgactatactacttaatcattgacctttatttaataagagatttttccataggatatgctgagctgtctcacttacatcagttgtgtctcctgaggtgggtgacaggagaccacaaatattgcatagcacacaaatcgttaatagcagctgtataccaaaccattacctaaatatgtagagtacaattcattctcactaatgtcagagagcatgctataaaatggtgaatccggacagctgaagatactgaataataacctctattttgaacaagtttacagtgttccaatcagtaattaaattgatacctgatgaatatatgtgtgtgtatgtattcatagcagagatggttttcctgagataaggattttgttattcggataggctgctgctggaattgtccttctacccttgtttctttgtccttagtcatcactcatacctctttccactcttctgccatcacttttgtcaccaaagtcatggtcctttccccgccgattgctgctgcaggtctagggcaccaagacttaggcagcactcaccatgtgccaagaactggaccacaggtaccatccagcattgctcatggagactctgtccctttctgtaggacaccctccttttagctagcaacccctccaccacctagagcctctggacctctcattttaatattaagaactaggaaaacttaccgctgagaataactagtacaactagaactggtagagaaatctgggtctcttgggaatggatttttaggctttattgattagaggtgtattaataatgcagtgttatagtttcatgacataacgaataaaaaagttcattttggacttgcctttcagctccctaggagctaaaagacgtatttaatgtaacttgtgtggtggaaataagttcttttttcaggcaaaagatgtgcaaacccatctggggaagaaacattaaaaactaaggagacagtgtcctagataactatgttcttttcctgttttagtctaaaataatgattagttttcttatatatcttcatttgtcttggttccttttagcccaatttaataatattattgcagatattgatgaaaacctttaccttcctcttaattcatcaaagtacttgataaaatttatacatagtacattaattgggaggtttttatgagattaattaatataatgaactgatgttgaaattatttaaaacctgaattattattgtattaagtaggacacttaatacagttaatcagttctgtctttattcatttgtgagaatttttggcaagctattgtgaatattcagggaagggaatgtatttttagcaggaatcttatacctcctacatagaaatgaagcatttactgaaacatccatgaaacaaaatgtttctgaatgtgtactatacacttgttataagccccttttcttctgtagctatattttggagaaaaatctttgctttgacaaaaaaaattatgttgacttacacatatattttataactaagcagtgtttggtttgtgataaaggatacaaaaatataaaaatgttcagcacacgtaagtaaggccttgttgacagtgtgagttatgctactggatactcaaaaggaacattcagtgttctcaggtggtctctagactgtctcaagcctaggaagatattttataagcaaaggaataagagaaggaagattcagatttaatccaagtgaagaattcagttttgtgtgccttatcctgttattttgagaggcagccaaaagatgctggtcagcaaggagaattgtaagttgggcagccaactctgatttctcaacctcttagctgttttcttaaactcagaatttttaatgaatttaaatgtccatatcaggtagactttggggatgcttttaccagtgattttcagaatgttactttctggcatttcttttcacgtagcattatattaaaaatgaattcattcatccaccttcccttgtccttactaattttccctcctactcccttcccccttgttcttgccatggggacatgcaaacactggtggttgatgtctgagcaaggctgctgacagggggaggaaggagatgtcaagcagaggtcaatggcagtgtgcccagcagcctaggaagtaggagggaaaagagagagagacagagatggtggatgaaagagaaagccaggatgattatggtggttatgatacttgtcatgctgaacacccaattgagcacccaataagcacataataatttaatcatcctctggcttggatggcagtgttctatcagtgttgacttcctggttgtgacagttttacagtgttagtgtagaagagaatccttgctttagagaggtacttactgaagtacttagggttaatgcaccattgtgctggaaaaagatacgcacacacacgcacacacacacacacacacactctcacacacacgcacaaatacatccatgtgttaggcagagggagcaaatgaggtaaaatgttaacaattaggaattctgggtgaagtggatagagggactctttgactgttcttgaaacttctctatacatttgatctgtttcaaattcttcagaaaatcaaactacaaaaacttaattcatttagtgaacatctactgaacatctgtatattaaatagtgttaaatgaatgtcaattaaaatgctcaaacacagtagaggttgattctcattcacataagtccatggtaggtgtttttggcaggtgggtgagtttctcccttagggagattgaggaacccagactcctcccaagttgcagccccaccgtcttctgaggggatgcatccatacccacttcgaagtagcatacattatttcctttctcattcctttggataccagccacaatttattcaaggtagacagaaaattgtagtatatagccatatgccctgacaaagaagggagaacagattttggtggacaactagcaaactctgatacaatctgttattaagcactgtgtgtggatagatgctaactagaaggagattatcttcccttcagcaaatataaactgaatgccgtttatttggttgaaactaagctagatcatgggagtatagaaattttataagaagacatagtcacttctgtcagtgagctcaagaagaattagtatgcggaatgtaatcatacctacagggggcttgtgccacttaagtaaaatgaaacattattttgagtacaatttagcaataaatgtactacgagatcattaaaaatcatgtttgaatgttattgtgtcaaggatgggaaaaagacttttgggttgtagacttgataattatagttaaaaacagtttttattcttgtttagtcttattttttatgtttaaacatatttatacttgctaacatttatacttgctaagtaaagactgtttttacaaccatgacaagaacaaaacatattagtaatgcaaatgccacatttcctacaatcaactaatcacactaacatatttgcatggaagaatcactgggattgatctggccacgtgtgtagtcatgcccaaaatgtgaagtccatctgttttgcaattttttttaaccactgttatccaaatgctccttggattttttttattagtggatatattttggaggtcagacaccctcttggctagatcatcacctttataacaaatatatatactattctcatggaaatatatttagacattgccctactgggaatttttttcaagtaattaatgtacagcttgtgcaacagcttgatcttggcttcatggaaataattcactcttagcagcatctaatgccacaaagcatttatggatgtcagctcagaacttacttttatttatctctgagttacttttttttttttttttttgagacagagtctcactctgtctttggcttgtccctaacctcttaacagacttaatattaagctccatttcactcagtcgttctgttgtcatataaatgagacattctacaagcatagtttttagtttctgccagagcatcatacaacattgtgagctatgatgaagataaagacctagagaagatatttaatatgaagttcattatctaatatttggtatgtgtggcaaaatagcaatctactgcttggttctgctgtaatctatttacccacccatcccatctttctttcaatttaaaaggataatgattttagtcacgattatacataaacccattaccataggcaataaacaatggggcaaaccattggtcccatagttggagtgtggtctgaagtgtgttttggtggagagagatctatgtctggagatagctaacatggatttggatcccagatctgctcctacctgttgctgtgcctgtgaccaaatcatgtgatctctctggtttcagtttacttgtgaataaagtaaataccttcatcaacacctgtttttgaatacaatgtttttctgtaatttttgcttcttataatgttataatgatcatccttacatctaaatcttggtttacattttcatcaattcttttggaaagattggagaagtaaattttggagatgtatgtcggctattaaaaatgtttaattttttaattaaaaattaaaac

SEQ ID NO: 435 - DNA, 13498 bp, Homo sapiens
  source 1..13498: mol_type = genomic DNA
gctgccgggacgggtccaagatggacggccgctcaggttctgcttttacctgcggcccagagccccattcattgccccggtgctgagcggcgccgcgagtcggcccgaggcctccggggactgccgtgccgggcgggagaccgccatggcgaccctggaaaagctgatgaaggccttcgagtccctcaagtccttccagcagcagcagcagcagcagcagcagcagcagcagcagcagcagcagcagcagcagcagcagcaacagccgccaccgccgccgccgccgccgccgcctcctcagcttcctcagccgccgccgcaggcacagccgctgctgcctcagccgcagccgcccccgccgccgcccccgccgccacccggcccggctgtggctgaggagccgctgcaccgaccaaagaaagaactttcagctaccaagaaagaccgtgtgaatcattgtctgacaatatgtgaaaacatagtggcacagtctgtcagaaattctccagaatttcagaaacttctgggcatcgctatggaactttttctgctgtgcagtgatgacgcagagtcagatgtcaggatggtggctgacgaatgcctcaacaaagttatcaaagctttgatggattctaatcttccaaggttacagctcgagctctataaggaaattaaaaagaatggtgcccctcggagtttgcgtgctgccctgtggaggtttgctgagctggctcacctggttcggcctcagaaatgcaggccttacctggtgaaccttctgccgtgcctgactcgaacaagcaagagacccgaagaatcagtccaggagaccttggctgcagctgttcccaaaattatggcttcttttggcaattttgcaaatgacaatgaaattaaggttttgttaaaggccttcatagcgaacctgaagtcaagctcccccaccattcggcggacagcggctggatcagcagtgagcatctgccagcactcaagaaggacacaatatttctatagttggctactaaatgtgctcttaggcttactcgttcctgtcgaggatgaacactccactctgctgattcttggcgtgctgctcaccctgaggtatttggtgcccttgctgcagcagcaggtcaaggacacaagcctgaaaggcagcttcggagtgacaaggaaagaaatggaagtctctccttctgcagagcagcttgtccaggtttatgaactgacgttacatcatacacagcaccaagaccacaatgttgtgaccggagccctggagctgttgcagcagctcttcagaacgcctccacccgagcttctgcaaaccctgaccgcagtcgggggcattgggcagctcaccgctgctaaggaggagtctggtggccgaagccgtagtgggagtattgtggaacttatagctggagggggttcctcatgcagccctgtcctttcaagaaaacaaaaaggcaaagtgctcttaggagaagaagaagccttggaggatgactctgaatcgagatcggatgtcagcagctctgccttaacagcctcagtgaaggatgagatcagtggagagctggctgcttcttcaggggtttccactccagggtcagcaggtcatgacatcatcacagaacagccacggtcacagcacacactgcaggcggactcagtggatctggccagctgtgacttgacaagctctgccactgatggggatgaggaggatatcttgagccacagctccagccaggtcagcgccgtcccatctgaccctgccatggacctgaatgatgggacccaggcctcgtcgcccatcagcgacagctcccagaccaccaccgaagggcctgattcagctgttaccccttcagacagttctgaaattgtgttagacggtaccgacaaccagtatttgggcctgcagattggacagccccaggatgaagatgaggaagccacaggtattcttcctgatgaagcctcggaggccttcaggaactcttccatggcccttcaacaggcacatttattgaaaaacatgagtcactgcaggcagccttctgacagcagtgttgataaatttgtgttgagagatgaagctactgaaccgggtgatcaagaaaacaagccttgccgcatcaaaggtgacattggacagtccactgatgatgactctgcacctcttgtccattgtgtccgccttttatctgcttcgtttttgctaacagggggaaaaaatgtgctggttccggacagggatgtgagggtcagcgtgaaggccctggccctcagctgtgtgggagcagctgtggccctccacccggaatctttcttcagcaaactctataaagttcctcttgacaccacggaataccctgaggaacagtatgtctcagacatcttgaactacatcgatcatggagacccacaggttcgaggagccactgccattctctgtgggaccctcatctgctccatcctcagcaggtcccgcttccacgtgggagattggatgggcaccattagaaccctcacaggaaatacattttctttggcggattgcattcctttgctgcggaaaacactgaaggatgagtcttctgttacttgcaagttagcttgtacagctgtgaggaactgtgtcatgagtctctgcagcagcagctacagtgagttaggactgcagctgatcatcgatgtgctgactctgaggaacagttcctattggctggtgaggacagagcttctggaaacccttgcagagattgacttcaggctggtgagctttttggaggcaaaagcagaaaacttacacagaggggctcatcattatacagggcttttaaaactgcaagaacgagtgctcaataatgttgtcatccatttgcttggagatgaagaccccagggtgcgacatgttgccgcagcatcactaattaggcttgtcccaaagctgttttataaatgtgaccaaggacaagctgatccagtagtggccgtggcaagagatcaaagcagtgtttacctgaaacttctcatgcatgagacgcagcctccatctcatttctccgtcagcacaataaccagaatatatagaggctataacctactaccaagcataacagacgtcactatggaaaataacctttcaagagttattgcagcagtttctcatgaactaatcacatcaaccaccagagcactcacatttggatgctgtgaagctttgtgtcttctttccactgccttcccagtttgcatttggagtttaggttggcactgtggagtgcctccactgagtgcctcagatgagtctaggaagagctgtaccgttgggatggccacaatgattctgaccctgctctcgtcagcttggttcccattggatctctcagcccatcaagatgctttgattttggccggaaacttgcttgcagccagtgctcccaaatctctgagaagttcatgggcctctgaagaagaagccaacccagcagccaccaagcaagaggaggtctggccagccctgggggaccgggccctggtgcccatggtggagcagctcttctctcacctgctgaaggtgattaacatttgtgcccacgtcctggatgacgtggctcctggacccgcaataaaggcagccttgccttctctaacaaaccccccttctctaagtcccatccgacgaaaggggaaggagaaagaaccaggagaacaagcatctgtaccgttgagtcccaagaaaggcagtgaggccagtgcagcttctagacaatctgatacctcaggtcctgttacaacaagtaaatcctcatcactggggagtttctatcatcttccttcatacctcaaactgcatgatgtcctgaaagctacacacgctaactacaaggtcacgctggatcttcagaacagcacggaaaagtttggagggtttctccgctcagccttggatgttctttctcagatactagagctggccacactgcaggacattgggaagtgtgttgaagagatcctaggatacctgaaatcctgctttagtcgagaaccaatgatggcaactgtttgtgttcaacaattgttgaagactctctttggcacaaacttggcctcccagtttgatggcttatcttccaaccccagcaagtcacaaggccgagcacagcgccttggctcctccagtgtgaggccaggcttgtaccactactgcttcatggccccgtacacccacttcacccaggccctcgctgacgccagcctgaggaacatggtgcaggcggagcaggagaacgacacctcgggatggtttgatgtcctccagaaagtgtctacccagttgaagacaaacctcacgagtgtcacaaagaaccgtgcagataagaatgctattcataatcacattcgtttgtttgaacctcttgttataaaagctttaaaacagtacacgactacaacatgtgtgcagttacagaagcaggttttagatttgctggcgcagctggttcagttacgggttaattactgtcttctggattcagatcaggtgtttattggctttgtattgaaacagtttgaatacattgaagtgggccagttcagggaatcagaggcaatcattccaaacatctttttcttcttggtattactatcttatgaacgctatcattcaaaacagatcattggaattcctaaaatcattcagctctgtgatggcatcatggccagtggaaggaaggctgtgacacatgccataccggctctgcagcccatagtccacgacctctttgtattaagaggaacaaataaagctgatgcaggaaaagagcttgaaacccaaaaagaggtggtggtgtcaatgttactgagactcatccagtaccatcaggtgttggagatgttcattcttgtcctgcagcagtgccacaaggagaatgaagacaagtggaagcgactgtctcgacagatagctgacatcatcctcccaatgttagccaaacagcagatgcacattgactctcatgaagcccttggagtgttaaatacattatttgagattttggccccttcctccctccgtccggtagacatgcttttacggagtatgttcgtcactccaaacacaatggcgtccgtgagcactgttcaactgtggatatcgggaattctggccattttgagggttctgatttcccagtcaactgaagatattgttctttctcgtattcaggagctctccttctctccgtatttaatctcctgtacagtaattaataggttaagagatggggacagtacttcaacgctagaagaacacagtgaagggaaacaaataaagaatttgccagaagaaacattttcaaggtttctattacaactggttggtattcttttagaagacattgttacaaaacagctgaaggtggaaatgagtgagcagcaacatactttctattgccaggaactaggcacactgctaatgtgtctgatccacatcttcaagtctggaatgttccggagaatcacagcagctgccactaggctgttccgcagtgatggctgtggcggcagtttctacaccctggacagcttgaacttgcgggctcgttccatgatcaccacccacccggccctggtgctgctctggtgtcagatactgctgcttgtcaaccacaccgactaccgctggtgggcagaagtgcagcagaccccgaaaagacacagtctgtccagcacaaagttacttagtccccagatgtctggagaagaggaggattctgacttggcagccaaacttggaatgtgcaatagagaaatagtacgaagaggggctctcattctcttctgtgattatgtctgtcagaacctccatgactccgagcacttaacgtggctcattgtaaatcacattcaagatctgatcagcctttcccacgagcctccagtacaggacttcatcagtgccgttcatcggaactctgctgccagcggcctgttcatccaggcaattcagtctcgttgtgaaaacctttcaactccaaccatgctgaagaaaactcttcagtgcttggaggggatccatctcagccagtcgggagctgtgctcacgctgtatgtggacaggcttctgtgcacccctttccgtgtgctggctcgcatggtcgacatccttgcttgtcgccgggtagaaatgcttctggctgcaaatttacagagcagcatggcccagttgccaatggaagaactcaacagaatccaggaataccttcagagcagcgggctcgctcagagacaccaaaggctctattccctgctggacaggtttcgtctctccaccatgcaagactcacttagtccctctcctccagtctcttcccacccgctggacggggatgggcacgtgtcactggaaacagtgagtccggacaaagactggtacgttcatcttgtcaaatcccagtgttggaccaggtcagattctgcactgctggaaggtgcagagctggtgaatcggattcctgctgaagatatgaatgccttcatgatgaactcggagttcaacctaagcctgctagctccatgcttaagcctagggatgagtgaaatttctggtggccagaagagtgccctttttgaagcagcccgtgaggtgactctggcccgtgtgagcggcaccgtgcagcagctccctgctgtccatcatgtcttccagcccgagctgcctgcagagccggcggcctactggagcaagttgaatgatctgtttggggatgctgcactgtatcagtccctgcccactctggcccgggccctggcacagtacctggtggtggtctccaaactgcccagtcatttgcaccttcctcctgagaaagagaaggacattgtgaaattcgtggtggcaacccttgaggccctgtcctggcatttgatccatgagcagatcccgctgagtctggatctccaggcagggctggactgctgctgcctggccctgcagctgcctggcctctggagcgtggtctcctccacagagtttgtgacccacgcctgctccctcatctactgtgtgcacttcatcctggaggccgttgcagtgcagcctggagagcagcttcttagtccagaaagaaggacaaataccccaaaagccatcagcgaggaggaggaggaagtagatccaaacacacagaatcctaagtatatcactgcagcctgtgagatggtggcagaaatggtggagtctctgcagtcggtgttggccttgggtcataaaaggaatagcggcgtgccggcgtttctcacgccattgctaaggaacatcatcatcagcctggcccgcctgccccttgtcaacagctacacacgtgtgcccccactggtgtggaagcttggatggtcacccaaaccgggaggggattttggcacagcattccctgagatccccgtggagttcctccaggaaaaggaagtctttaaggagttcatctaccgcatcaacacactaggctggaccagtcgtactcagtttgaagaaacttgggccaccctccttggtgtcctggtgacgcagcccctcgtgatggagcaggaggagagcccaccagaagaagacacagagaggacccagatcaacgtcctggccgtgcaggccatcacctcactggtgctcagtgcaatgactgtgcctgtggccggcaacccagctgtaagctgcttggagcagcagccccggaacaagcctctgaaagctctcgacaccaggtttgggaggaagctgagcattatcagagggattgtggagcaagagattcaagcaatggtttcaaagagagagaatattgccacccatcatttatatcaggcatgggatcctgtcccttctctgtctccggctactacaggtgccctcatcagccacgagaagctgctgctacagatcaaccccgagcgggagctggggagcatgagctacaaactcggccaggtgtccatacactccgtgtggctggggaacagcatcacacccctgagggaggaggaatgggacgaggaagaggaggaggaggccgacgcccctgcaccttcgtcaccacccacgtctccagtcaactccaggaaacaccgggctggagttgacatccactcctgttcgcagtttttgcttgagttgtacagccgctggatcctgccgtccagctcagccaggaggaccccggccatcctgatcagtgaggtggtcagatcccttctagtggtctcagacttgttcaccgagcgcaaccagtttgagctgatgtatgtgacgctgacagaactgcgaagggtgcacccttcagaagacgagatcctcgctcagtacctggtgcctgccacctgcaaggcagctgccgtccttgggatggacaaggccgtggcggagcctgtcagccgcctgctggagagcacgctcaggagcagccacctgcccagcagggttggagccctgcacggcgtcctctatgtgctggagtgcgacctgctggacgacactgccaagcagctcatcccggtcatcagcgactatctcctctccaacctgaaagggatcgcccactgcgtgaacattcacagccagcagcacgtactggtcatgtgtgccactgcgttttacctcattgagaactatcctctggacgtagggccggaattttcagcatcaataatacagatgtgtggggtgatgctgtctggaagtgaggagtccaccccctccatcatttaccactgtgccctcagaggcctggagcgcctcctgctctctgagcagctctcccgcctggatgcagaatcgctggtcaagctgagtgtggacagagtgaacgtgcacagcccgcaccgggccatggcggctctgggcctgatgctcacctgcatgtacacaggaaaggagaaagtcagtccgggtagaacttcagaccctaatcctgcagcccccgacagcgagtcagtgattgttgctatggagcgggtatctgttctttttgataggatcaggaaaggctttccttgtgaagccagagtggtggccaggatcctgccccagtttctagacgacttcttcccaccccaggacatcatgaacaaagtcatcggagagtttctgtccaaccagcagccatacccccagttcatggccaccgtggtgtataaggtgtttcagactctgcacagcaccgggcagtcgtccatggtccgggactgggtcatgctgtccctctccaacttcacgcagagggccccggtcgccatggccacgtggagcctctcctgcttctttgtcagcgcgtccaccagcccgtgggtcgcggcgatcctcccacatgtcatcagcaggatgggcaagctggagcaggtggacgtgaaccttttctgcctggtcgccacagacttctacagacaccagatagaggaggagctcgaccgcagggccttccagtctgtgcttgaggtggttgcagccccaggaagcccatatcaccggctgctgacttgtttacgaaatgtccacaaggtcaccacctgctgagcgccatggtgggagagactgtgaggcggcagctggggccggagcctttggaagtctgcgcccttgtgccctgcctccaccgagccagcttggtccctatgggcttccgcacatgccgcgggcggccaggcaacgtgcgtgtctctgccatgtggcagaagtgctctttgtggcagtggccaggcagggagtgtctgcagtcctggtggggctgagcctgaggccttccagaaagcaggagcagctgtgctgcaccccatgtgggtgaccaggtcctttctcctgatagtcacctgctggttgttgccaggttgcagctgctcttgcatctgggccagaagtcctccctcctgcaggctggctgttggcccctctgctgtcctgcagtagaaggtgccgtgagcaggctttgggaacactggcctgggtctccctggtggggtgtgcatgccacgccccgtgtctggatgcacagatgccatggcctgtgctgggccagtggctgggggtgctagacacccggcaccattctcccttctctcttttcttctcaggatttaaaatttaattatatcagtaaagagattaattttaacgtaactctttctatgcccgtgtaaagtatgtgaatcgcaaggcctgtgctgcatgcgacagcgtccggggtggtggacagggcccccggccacgctccctctcctgtagccactggcatagccctcctgagcacccgctgacatttccgttgtacatgttcctgtttatgcattcacaaggtgactgggatgtagagaggcgttagtgggcaggtggccacagcaggactgaggacaggcccccattatcctaggggtgcgctcacctgcagcccctcctcctcgggcacagacgactgtcgttctccacccaccagtcagggacagcagcctccctgtcactcagctgagaaggccagccctccctggctgtgagcagcctccactgtgtccagagacatgggcctcccactcctgttccttgctagccctggggtggcgtctgcctaggagctggctggcaggtgttgggacctgctgctccatggatgcatgccctaagagtgtcactgagctgtgttttgtctgagcctctctcggtcaacagcaaagcttggtgtcttggcactgttagtgacagagcccagcatcccttctgcccccgttccagctgacatcttgcacggtgaccccttttagtcaggagagtgcagatctgtgctcatcggagactgccccacggccctgtcagagccgccactcctatccccaggccaggtccctggaccagcctcctgtttgcaggcccagaggagccaagtcattaaaatggaagtggattctggatggccgggctgctgctgatgtaggagctggatttgggagctctgcttgccgactggctgtgagacgaggcaggggctctgcttcctcagccctagaggcgagccaggcaaggttggcgactgtcatgtggcttggtttggtcatgcccgtcgatgttttgggtattgaatgtggtaagtggaggaaatgttggaactctgtgcaggtgctgccttgagacccccaagcttccacctgtccctctcctatgtggcagctggggagcagctgagatgtggacttgtatgctgcccacatacgtgagggggagctgaaagggagcccctcctctgagcagcctctgccaggcctgtatgaggcttttcccaccagctcccaacagaggcctcccccagccaggaccacctcgtcctcgtggcggggcagcaggagcggtagaaaggggtccgatgtttgaggaggcccttaagggaagctactgaattataacacgtaagaaaatcaccattccgtattggttgggggctcctgtttctcatcctagctttttcctggaaagcccgctagaaggtttgggaacgaggggaaagttctcagaactgttggctgctccccacccgcctcccgcctcccccgcaggttatgtcagcagctctgagacagcagtatcacaggccagatgttgttcctggctagatgtttacatttgtaagaaataacactgtgaatgtaaaacagagccattcccttggaatgcatatcgctgggctcaacatagagtttgtcttcctcttgtttacgacgtgatctaaaccagtccttagcaaggggctcagaacaccccgctctggcagtaggtgtcccccacccccaaagacctgcctgtgtgctccggagatgaatatgagctcattagtaaaaatgacttcacccacgcatatacataaagtatccatgcatgtgcatatagacacatctataattttacacacacacctctcaagacggagatgcatggcctctaagagtgcccgtgtcggttcttcctggaagttgactttccttagacccgccaggtcaagttagccgcgtgacggacatccaggcgtgggacgtggtcagggcagggctcattcattgcccactaggatcccactggcgaagatggtctccatatcagctctctgcagaagggaggaagactttatcatgttcctaaaaatctgtggcaagcacccatcgtattatccaaattttgttgcaaatgtgattaatttggttgtcaagttttgggggtgggctgtggggagattgcttttgttttcctgctggtaatatcgggaaagattttaatgaaaccagggtagaattgtttggcaatgcactgaagcgtgtttctttcccaaaatgtgcctcccttccgctgcgggcccagctgagtctatgtaggtgatgtttccagctgccaagtgctctttgttactgtccaccctcatttctgccagcgcatgtgtcctttcaaggggaaaatgtgaagctgaaccccctccagacacccagaatgtagcatctgagaaggccctgtgccctaaaggacacccctcgcccccatcttcatggagggggtcatttcagagccctcggagccaatgaacagctcctcctcttggagctgagatgagccccacgtggagctcgggacggatagtagacagcaataactcggtgtgtggccgcctggcaggtggaacttcctcccgttgcggggtggagtgaggttagttctgtgtgtctggtgggtggagtcaggcttctcttgctacctgtgagcatccttcccagcagacatcctcatcgggctttgtccctcccccgcttcctccctctgcggggaggacccgggaccacagctgctggccagggtagacttggagctgtcctccagaggggtcacgtgtaggagtgagaagaaggaagatcttgagagctgctgagggaccttggagagctcaggatggctcagacgaggacactcgcttgccgggcctgggcctcctgggaaggagggagctgctcagaatgccgcatgacaactgaaggcaacctggaaggttcaggggccgctcttcccccatgtgcctgtcacgctctggtgcagtcaaaggaacgccttcccctcagttgtttctaagagcagagtctcccgctgcaatctgggtggtaactgccagccttggaggatcgtggccaacgtggacctgcctacggagggtgggctctgacccaagtggggcctccttgtccaggtctcactgctttgcaccgtggtcagagggactgtcagctgagcttgagctcccctggagccagcagggctgtgatgggcgagtcccggagccccacccagacctgaatgcttctgagagcaaagggaaggactgacgagagatgtatatttaattttttaactgctgcaaacattgtacatccaaattaaaggaaaaaaatggaaaccatcaaaaaaaaaaaaaaaaaa

SEQ ID NO: 436 - DNA, 13472 bp, Homo sapiens
  source 1..13472: mol_type = genomic DNA
gctgccgggacgggtccaagatggacggccgctcaggttctgcttttacctgcggcccagagccccattcattgccccggtgctgagcggcgccgcgagtcggcccgaggcctccggggactgccgtgccgggcgggagaccgccatggcgaccctggaaaagctgatgaaggccttcgagtccctcaagtccttccagcagcagcagcagcagcagcagcagcagcagcagcagcagcagcagcagcagcagcaacagccgccaccgccgccgccgccgccgccgcctcctcagcttcctcagccgccgccgcaggcacagccgctgctgcctcagccgcagccgcccccgccgccgcccccgccgccacccggcccggctgtggctgaggagccgctgcaccgaccaaagaaagaactttcagctaccaagaaagaccgtgtgaatcattgtctgacaatatgtgaaaacatagtggcacagtctgtcagaaattctccagaatttcagaaacttctgggcatcgctatggaactttttctgctgtgcagtgatgacgcagagtcagatgtcaggatggtggctgacgaatgcctcaacaaagttatcaaagctttgatggattctaatcttccaaggttacagctcgagctctataaggaaattaaaaagaatggtgcccctcggagtttgcgtgctgccctgtggaggtttgctgagctggctcacctggttcggcctcagaaatgcaggccttacctggtgaaccttctgccgtgcctgactcgaacaagcaagagacccgaagaatcagtccaggagaccttggctgcagctgttcccaaaattatggcttcttttggcaattttgcaaatgacaatgaaattaaggttttgttaaaggccttcatagcgaacctgaagtcaagctcccccaccattcggcggacagcggctggatcagcagtgagcatctgccagcactcaagaaggacacaatatttctatagttggctactaaatgtgctcttaggcttactcgttcctgtcgaggatgaacactccactctgctgattcttggcgtgctgctcaccctgaggtatttggtgcccttgctgcagcagcaggtcaaggacacaagcctgaaaggcagcttcggagtgacaaggaaagaaatggaagtctctccttctgcagagcagcttgtccaggtttatgaactgacgttacatcatacacagcaccaagaccacaatgttgtgaccggagccctggagctgttgcagcagctcttcagaacgcctccacccgagcttctgcaaaccctgaccgcagtcgggggcattgggcagctcaccgctgctaaggaggagtctggtggccgaagccgtagtgggagtattgtggaacttatagctggagggggttcctcatgcagccctgtcctttcaagaaaacaaaaaggcaaagtgctcttaggagaagaagaagccttggaggatgactctgaatcgagatcggatgtcagcagctctgccttaacagcctcagtgaaggatgagatcagtggagagctggctgcttcttcaggggtttccactccagggtcagcaggtcatgacatcatcacagaacagccacggtcacagcacacactgcaggcggactcagtggatctggccagctgtgacttgacaagctctgccactgatggggatgaggaggatatcttgagccacagctccagccaggtcagcgccgtcccatctgaccctgccatggacctgaatgatgggacccaggcctcgtcgcccatcagcgacagctcccagaccaccaccgaagggcctgattcagctgttaccccttcagacagttctgaaattgtgttagacggtaccgacaaccagtatttgggcctgcagattggacagccccaggatgaagatgaggaagccacaggtattcttcctgatgaagcctcggaggccttcaggaactcttccatggcccttcaacaggcacatttattgaaaaacatgagtcactgcaggcagccttctgacagcagtgttgataaatttgtgttgagagatgaagctactgaaccgggtgatcaagaaaacaagccttgccgcatcaaaggtgacattggacagtccactgatgatgactctgcacctcttgtccattgtgtccgccttttatctgcttcgtttttgctaacagggggaaaaaatgtgctggttccggacagggatgtgagggtcagcgtgaaggccctggccctcagctgtgtgggagcagctgtggccctccacccggaatctttcttcagcaaactctataaagttcctcttgacaccacggaataccctgaggaacagtatgtctcagacatcttgaactacatcgatcatggagacccacaggttcgaggagccactgccattctctgtgggaccctcatctgctccatcctcagcaggtcccgcttccacgtgggagattggatgggcaccattagaaccctcacaggaaatacattttctttggcggattgcattcctttgctgcggaaaacactgaaggatgagtcttctgttacttgcaagttagcttgtacagctgtgaggaactgtgtcatgagtctctgcagcagcagctacagtgagttaggactgcagctgatcatcgatgtgctgactctgaggaacagttcctattggctggtgaggacagagcttctggaaacccttgcagagattgacttcaggctggtgagctttttggaggcaaaagcagaaaacttacacagaggggctcatcattatacagggcttttaaaactgcaagaacgagtgctcaataatgttgtcatccatttgcttggagatgaagaccccagggtgcgacatgttgccgcagcatcactaattaggcttgtcccaaagctgttttataaatgtgaccaaggacaagctgatccagtagtggccgtggcaagagatcaaagcagtgtttacctgaaacttctcatgcatgagacgcagcctccatctcatttctccgtcagcacaataaccagaatatatagaggctataacctactaccaagcataacagacgtcactatggaaaataacctttcaagagttattgcagcagtttctcatgaactaatcacatcaaccaccagagcactcacatttggatgctgtgaagctttgtgtcttctttccactgccttcccagtttgcatttggagtttaggttggcactgtggagtgcctccactgagtgcctcagatgagtctaggaagagctgtaccgttgggatggccacaatgattctgaccctgctctcgtcagcttggttcccattggatctctcagcccatcaagatgctttgattttggccggaaacttgcttgcagccagtgctcccaaatctctgagaagttcatgggcctctgaagaagaagccaacccagcagccaccaagcaagaggaggtctggccagccctgggggaccgggccctggtgcccatggtggagcagctcttctctcacctgctgaaggtgattaacatttgtgcccacgtcctggatgacgtggctcctggacccgcaataaaggcagccttgccttctctaacaaaccccccttctctaagtcccatccgacgaaaggggaaggagaaagaaccaggagaacaagcatctgtaccgttgagtcccaagaaaggcagtgaggccagtgcagcttctagacaatctgatacctcaggtcctgttacaacaagtaaatcctcatcactggggagtttctatcatcttccttcatacctcaaactgcatgatgtcctgaaagctacacacgctaactacaaggtcacgctggatcttcagaacagcacggaaaagtttggagggtttctccgctcagccttggatgttctttctcagatactagagctggccacactgcaggacattgggaagtgtgttgaagagatcctaggatacctgaaatcctgctttagtcgagaaccaatgatggcaactgtttgtgttcaacaattgttgaagactctctttggcacaaacttggcctcccagtttgatggcttatcttccaaccccagcaagtcacaaggccgagcacagcgccttggctcctccagtgtgaggccaggcttgtaccactactgcttcatggccccgtacacccacttcacccaggccctcgctgacgccagcctgaggaacatggtgcaggcggagcaggagaacgacacctcgggatggtttgatgtcctccagaaagtgtctacccagttgaagacaaacctcacgagtgtcacaaagaaccgtgcagataagaatgctattcataatcacattcgtttgtttgaacctcttgttataaaagctttaaaacagtacacgactacaacatgtgtgcagttacagaagcaggttttagatttgctggcgcagctggttcagttacgggttaattactgtcttctggattcagatcaggtgtttattggctttgtattgaaacagtttgaatacattgaagtgggccagttcagggaatcagaggcaatcattccaaacatctttttcttcttggtattactatcttatgaacgctatcattcaaaacagatcattggaattcctaaaatcattcagctctgtgatggcatcatggccagtggaaggaaggctgtgacacatgccataccggctctgcagcccatagtccacgacctctttgtattaagaggaacaaataaagctgatgcaggaaaagagcttgaaacccaaaaagaggtggtggtgtcaatgttactgagactcatccagtaccatcaggtgttggagatgttcattcttgtcctgcagcagtgccacaaggagaatgaagacaagtggaagcgactgtctcgacagatagctgacatcatcctcccaatgttagccaaacagcagatgcacattgactctcatgaagcccttggagtgttaaatacattatttgagattttggccccttcctccctccgtccggtagacatgcttttacggagtatgttcgtcactccaaacacaatggcgtccgtgagcactgttcaactgtggatatcgggaattctggccattttgagggttctgatttcccagtcaactgaagatattgttctttctcgtattcaggagctctccttctctccgtatttaatctcctgtacagtaattaataggttaagagatggggacagtacttcaacgctagaagaacacagtgaagggaaacaaataaagaatttgccagaagaaacattttcaaggtttctattacaactggttggtattcttttagaagacattgttacaaaacagctgaaggtggaaatgagtgagcagcaacatactttctattgccaggaactaggcacactgctaatgtgtctgatccacatcttcaagtctggaatgttccggagaatcacagcagctgccactaggctgttccgcagtgatggctgtggcggcagtttctacaccctggacagcttgaacttgcgggctcgttccatgatcaccacccacccggccctggtgctgctctggtgtcagatactgctgcttgtcaaccacaccgactaccgctggtgggcagaagtgcagcagaccccgaaaagacacagtctgtccagcacaaagttacttagtccccagatgtctggagaagaggaggattctgacttggcagccaaacttggaatgtgcaatagagaaatagtacgaagaggggctctcattctcttctgtgattatgtctgtcagaacctccatgactccgagcacttaacgtggctcattgtaaatcacattcaagatctgatcagcctttcccacgagcctccagtacaggacttcatcagtgccgttcatcggaactctgctgccagcggcctgttcatccaggcaattcagtctcgttgtgaaaacctttcaactccaaccatgctgaagaaaactcttcagtgcttggaggggatccatctcagccagtcgggagctgtgctcacgctgtatgtggacaggcttctgtgcacccctttccgtgtgctggctcgcatggtcgacatccttgcttgtcgccgggtagaaatgcttctggctgcaaatttacagagcagcatggcccagttgccaatggaagaactcaacagaatccaggaataccttcagagcagcgggctcgctcagagacaccaaaggctctattccctgctggacaggtttcgtctctccaccatgcaagactcacttagtccctctcctccagtctcttcccacccgctggacggggatgggcacgtgtcactggaaacagtgagtccggacaaagactggtacgttcatcttgtcaaatcccagtgttggaccaggtcagattctgcactgctggaaggtgcagagctggtgaatcggattcctgctgaagatatgaatgccttcatgatgaactcggagttcaacctaagcctgctagctccatgcttaagcctagggatgagtgaaatttctggtggccagaagagtgccctttttgaagcagcccgtgaggtgactctggcccgtgtgagcggcaccgtgcagcagctccctgctgtccatcatgtcttccagcccgagctgcctgcagagccggcggcctactggagcaagttgaatgatctgtttggggatgctgcactgtatcagtccctgcccactctggcccgggccctggcacagtacctggtggtggtctccaaactgcccagtcatttgcaccttcctcctgagaaagagaaggacattgtgaaattcgtggtggcaacccttgaggccctgtcctggcatttgatccatgagcagatcccgctgagtctggatctccaggcagggctggactgctgctgcctggccctgcagctgcctggcctctggagcgtggtctcctccacagagtttgtgacccacgcctgctccctcatctactgtgtgcacttcatcctggaggccgttgcagtgcagcctggagagcagcttcttagtccagaaagaaggacaaataccccaaaagccatcagcgaggaggaggaggaagtagatccaaacacacagaatcctaagtatatcactgcagcctgtgagatggtggcagaaatggtggagtctctgcagtcggtgttggccttgggtcataaaaggaatagcggcgtgccggcgtttctcacgccattgctaaggaacatcatcatcagcctggcccgcctgccccttgtcaacagctacacacgtgtgcccccactggtgtggaagcttggatggtcacccaaaccgggaggggattttggcacagcattccctgagatccccgtggagttcctccaggaaaaggaagtctttaaggagttcatctaccgcatcaacacactaggctggaccagtcgtactcagtttgaagaaacttgggccaccctccttggtgtcctggtgacgcagcccctcgtgatggagcaggaggagagcccaccagaagaagacacagagaggacccagatcaacgtcctggccgtgcaggccatcacctcactggtgctcagtgcaatgactgtgcctgtggccggcaacccagctgtaagctgcttggagcagcagccccggaacaagcctctgaaagctctcgacaccaggtttgggaggaagctgagcattatcagagggattgtggagcaagagattcaagcaatggtttcaaagagagagaatattgccacccatcatttatatcaggcatgggatcctgtcccttctctgtctccggctactacaggtgccctcatcagccacgagaagctgctgctacagatcaaccccgagcgggagctggggagcatgagctacaaactcggccaggtgtccatacactccgtgtggctggggaacagcatcacacccctgagggaggaggaatgggacgaggaagaggaggaggaggccgacgcccctgcaccttcgtcaccacccacgtctccagtcaactccaggaaacaccgggctggagttgacatccactcctgttcgcagtttttgcttgagttgtacagccgctggatcctgccgtccagctcagccaggaggaccccggccatcctgatcagtgaggtggtcagatcccttctagtggtctcagacttgttcaccgagcgcaaccagtttgagctgatgtatgtgacgctgacagaactgcgaagggtgcacccttcagaagacgagatcctcgctcagtacctggtgcctgccacctgcaaggcagctgccgtccttgggatggacaaggccgtggcggagcctgtcagccgcctgctggagagcacgctcaggagcagccacctgcccagcagggttggagccctgcacggcgtcctctatgtgctggagtgcgacctgctggacgacactgccaagcagctcatcccggtcatcagcgactatctcctctccaacctgaaagggatcgcccactgcgtgaacattcacagccagcagcacgtactggtcatgtgtgccactgcgttttacctcattgagaactatcctctggacgtagggccggaattttcagcatcaataatacagatgtgtggggtgatgctgtctggaagtgaggagtccaccccctccatcatttaccactgtgccctcagaggcctggagcgcctcctgctctctgagcagctctcccgcctggatgcagaatcgctggtcaagctgagtgtggacagagtgaacgtgcacagcccgcaccgggccatggcggctctgggcctgatgctcacctgcatgtacacaggaaaggagaaagtcagtccgggtagaacttcagaccctaatcctgcagcccccgacagcgagtcagtgattgttgctatggagcgggtatctgttctttttgataggatcaggaaaggctttccttgtgaagccagagtggtggccaggatcctgccccagtttctagacgacttcttcccaccccaggacatcatgaacaaagtcatcggagagtttctgtccaaccagcagccatacccccagttcatggccaccgtggtgtataaggtgtttcagactctgcacagcaccgggcagtcgtccatggtccgggactgggtcatgctgtccctctccaacttcacgcagagggccccggtcgccatggccacgtggagcctctcctgcttctttgtcagcgcgtccaccagcccgtgggtcgcggcgatcctcccacatgtcatcagcaggatgggcaagctggagcaggtggacgtgaaccttttctgcctggtcgccacagacttctacagacaccagatagaggaggagctcgaccgcagggccttccagtctgtgcttgaggtggttgcagccccaggaagcccatatcaccggctgctgacttgtttacgaaatgtccacaaggtcaccacctgctgagcgccatggtgggagagactgtgaggcggcagctggggccggagcctttggaagtctgcgcccttgtgccctgcctccaccgagccagcttggtccctatgggcttccgcacatgccgcgggcggccaggcaacgtgcgtgtctctgccatgtggcagaagtgctctttgtggcagtggccaggcagggagtgtctgcagtcctggtggggctgagcctgaggccttccagaaagcaggagcagctgtgctgcaccccatgtgggtgaccaggtcctttctcctgatagtcacctgctggttgttgccaggttgcagctgctcttgcatctgggccagaagtcctccctcctgcaggctggctgttggcccctctgctgtcctgcagtagaaggtgccgtgagcaggctttgggaacactggcctgggtctccctggtggggtgtgcatgccacgccccgtgtctggatgcacagatgccatggcctgtgctgggccagtggctgggggtgctagacacccggcaccattctcccttctctcttttcttctcaggatttaaaatttaattatatcagtaaagagattaattttaacgtaactctttctatgcccgtgtaaagtatgtgaatcgcaaggcctgtgctgcatgcgacagcgtccggggtggtggacagggcccccggccacgctccctctcctgtagccactggcatagccctcctgagcacccgctgacatttccgttgtacatgttcctgtttatgcattcacaaggtgactgggatgtagagaggcgttagtgggcaggtggccacagcaggactgaggacaggcccccattatcctaggggtgcgctcacctgcagcccctcctcctcgggcacagacgactgtcgttctccacccaccagtcagggacagcagcctccctgtcactcagctgagaaggccagccctccctggctgtgagcagcctccactgtgtccagagacatgggcctcccactcctgttccttgctagccctggggtggcgtctgcctaggagctggctggcaggtgttgggacctgctgctccatggatgcatgccctaagagtgtcactgagctgtgttttgtctgagcctctctcggtcaacagcaaagcttggtgtcttggcactgttagtgacagagcccagcatcccttctgcccccgttccagctgacatcttgcacggtgaccccttttagtcaggagagtgcagatctgtgctcatcggagactgccccacggccctgtcagagccgccactcctatccccaggccaggtccctggaccagcctcctgtttgcaggcccagaggagccaagtcattaaaatggaagtggattctggatggccgggctgctgctgatgtaggagctggatttgggagctctgcttgccgactggctgtgagacgaggcaggggctctgcttcctcagccctagaggcgagccaggcaaggttggcgactgtcatgtggcttggtttggtcatgcccgtcgatgttttgggtattgaatgtggtaagtggaggaaatgttggaactctgtgcaggtgctgccttgagacccccaagcttccacctgtccctctcctatgtggcagctggggagcagctgagatgtggacttgtatgctgcccacatacgtgagggggagctgaaagggagcccctcctctgagcagcctctgccaggcctgtatgaggcttttcccaccagctcccaacagaggcctcccccagccaggaccacctcgtcctcgtggcggggcagcaggagcggtagaaaggggtccgatgtttgaggaggcccttaagggaagctactgaattataacacgtaagaaaatcaccattccgtattggttgggggctcctgtttctcatcctagctttttcctggaaagcccgctagaaggtttgggaacgaggggaaagttctcagaactgttggctgctccccacccgcctcccgcctcccccgcaggttatgtcagcagctctgagacagcagtatcacaggccagatgttgttcctggctagatgtttacatttgtaagaaataacactgtgaatgtaaaacagagccattcccttggaatgcatatcgctgggctcaacatagagtttgtcttcctcttgtttacgacgtgatctaaaccagtccttagcaaggggctcagaacaccccgctctggcagtaggtgtcccccacccccaaagacctgcctgtgtgctccggagatgaatatgagctcattagtaaaaatgacttcacccacgcatatacataaagtatccatgcatgtgcatatagacacatctataattttacacacacacctctcaagacggagatgcatggcctctaagagtgcccgtgtcggttcttcctggaagttgactttccttagacccgccaggtcaagttagccgcgtgacggacatccaggcgtgggacgtggtcagggcagggctcattcattgcccactaggatcccactggcgaagatggtctccatatcagctctctgcagaagggaggaagactttatcatgttcctaaaaatctgtggcaagcacccatcgtattatccaaattttgttgcaaatgtgattaatttggttgtcaagttttgggggtgggctgtggggagattgcttttgttttcctgctggtaatatcgggaaagattttaatgaaaccagggtagaattgtttggcaatgcactgaagcgtgtttctttcccaaaatgtgcctcccttccgctgcgggcccagctgagtctatgtaggtgatgtttccagctgccaagtgctctttgttactgtccaccctcatttctgccagcgcatgtgtcctttcaaggggaaaatgtgaagctgaaccccctccagacacccagaatgtagcatctgagaaggccctgtgccctaaaggacacccctcgcccccatcttcatggagggggtcatttcagagccctcggagccaatgaacagctcctcctcttggagctgagatgagccccacgtggagctcgggacggatagtagacagcaataactcggtgtgtggccgcctggcaggtggaacttcctcccgttgcggggtggagtgaggttagttctgtgtgtctggtgggtggagtcaggcttctcttgctacctgtgagcatccttcccagcagacatcctcatcgggctttgtccctcccccgcttcctccctctgcggggaggacccgggaccacagctgctggccagggtagacttggagctgtcctccagaggggtcacgtgtaggagtgagaagaaggaagatcttgagagctgctgagggaccttggagagctcaggatggctcagacgaggacactcgcttgccgggcctgggcctcctgggaaggagggagctgctcagaatgccgcatgacaactgaaggcaacctggaaggttcaggggccgctcttcccccatgtgcctgtcacgctctggtgcagtcaaaggaacgccttcccctcagttgtttctaagagcagagtctcccgctgcaatctgggtggtaactgccagccttggaggatcgtggccaacgtggacctgcctacggagggtgggctctgacccaagtggggcctccttgtccaggtctcactgctttgcaccgtggtcagagggactgtcagctgagcttgagctcccctggagccagcagggctgtgatgggcgagtcccggagccccacccagacctgaatgcttctgagagcaaagggaaggactgacgagagatgtatatttaattttttaactgctgcaaacattgtacatccaaattaaaggaaaaaaatggaaacca

SEQ ID NO: 437 - DNA, 4443 bp, Homo sapiens
  source 1..4443: mol_type = genomic DNA
agacgcctgggaactgcggccgcgggctcgcgctcctcgccaggccctgccgccgggctgccatccttgccctgccatgtctcgccggaagcctgcgtcgggcggcctcgctgcctccagctcagcccctgcgaggcaagcggttttgagccgattcttccagtctacgggaagcctgaaatccacctcctcctccacaggtgcagccgaccaggtggaccctggcgctgcagcggctgcagcggccgcagcggccgcagcgcccccagcgcccccagctcccgccttcccgccccagctgccgccgcacatagctacagaaattgacagaagaaagaagagaccattggaaaatgatgggcctgttaaaaagaaagtaaagaaagtccaacaaaaggaaggaggaagtgatctgggaatgtctggcaactctgagccaaagaaatgtctgaggaccaggaatgtttcaaagtctctggaaaaattgaaagaattctgctgcgattctgcccttcctcaaagtagagtccagacagaatctctgcaggagagatttgcagttctgccaaaatgtactgattttgatgatatcagtcttctacacgcaaagaatgcagtttcttctgaagattcgaaacgtcaaattaatcaaaaggacacaacactttttgatctcagtcagtttggatcatcaaatacaagtcatgaaaatttacagaaaactgcttccaaatcagctaacaaacggtccaaaagcatctatacgccgctagaattacaatacatagaaatgaagcagcagcacaaagatgcagttttgtgtgtggaatgtggatataagtatagattctttggggaagatgcagagattgcagcccgagagctcaatatttattgccatttagatcacaactttatgacagcaagtatacctactcacagactgtttgttcatgtacgccgcctggtggcaaaaggatataaggtgggagttgtgaagcaaactgaaactgcagcattaaaggccattggagacaacagaagttcactcttttcccggaaattgactgccctttatacaaaatctacacttattggagaagatgtgaatcccctaatcaagctggatgatgctgtaaatgttgatgagataatgactgatacttctaccagctatcttctgtgcatctctgaaaataaggaaaatgttagggacaaaaaaaagggcaacatttttattggcattgtgggagtgcagcctgccacaggcgaggttgtgtttgatagtttccaggactctgcttctcgttcagagctagaaacccggatgtcaagcctgcagccagtagagctgctgcttccttcggccttgtccgagcaaacagaggcgctcatccacagagccacatctgttagtgtgcaggatgacagaattcgagtcgaaaggatggataacatttattttgaatacagccatgctttccaggcagttacagagttttatgcaaaagatacagttgacatcaaaggttctcaaattatttctggcattgttaacttagagaagcctgtgatttgctctttggctgccatcataaaatacctcaaagaattcaacttggaaaagatgctctccaaacctgagaattttaaacagctatcaagtaaaatggaatttatgacaattaatggaacaacattaaggaatctggaaatcctacagaatcagactgatatgaaaaccaaaggaagtttgctgtgggttttagaccacactaaaacttcatttgggagacggaagttaaagaagtgggtgacccagccactccttaaattaagggaaataaatgcccggcttgatgctgtatcggaagttctccattcagaatctagtgtgtttggtcagatagaaaatcatctacgtaaattgcccgacatagagaggggactctgtagcatttatcacaaaaaatgttctacccaagagttcttcttgattgtcaaaactttatatcacctaaagtcagaatttcaagcaataatacctgctgttaattcccacattcagtcagacttgctccggaccgttattttagaaattcctgaactcctcagtccagtggagcattacttaaagatactcaatgaacaagctgccaaagttggggataaaactgaattatttaaagacctttctgacttccctttaataaaaaagaggaaggatgaaattcaaggtgttattgacgagatccgaatgcatttgcaagaaatacgaaaaatactaaaaaatccttctgcacaatatgtgacagtatcaggacaggagtttatgatagaaataaagaactctgctgtatcttgtataccaactgattgggtaaaggttggaagcacaaaagctgtgagccgctttcactctccttttattgtagaaaattacagacatctgaatcagctccgggagcagctagtccttgactgcagtgctgaatggcttgattttctagagaaattcagtgaacattatcactccttgtgtaaagcagtgcatcacctagcaactgttgactgcattttctccctggccaaggtcgctaagcaaggagattactgcagaccaactgtacaagaagaaagaaaaattgtaataaaaaatggaaggcaccctgtgattgatgtgttgctgggagaacaggatcaatatgtcccaaataatacagatttatcagaggactcagagagagtaatgataattaccggaccaaacatgggtggaaagagctcctacataaaacaagttgcattgattaccatcatggctcagattggctcctatgttcctgcagaagaagcgacaattgggattgtggatggcattttcacaaggatgggtgctgcagacaatatatataaaggacagagtacatttatggaagaactgactgacacagcagaaataatcagaaaagcaacatcacagtccttggttatcttggatgaactaggaagagggacgagcactcatgatggaattgccattgcctatgctacacttgagtatttcatcagagatgtgaaatccttaaccctgtttgtcacccattatccgccagtttgtgaactagaaaaaaattactcacaccaggtggggaattaccacatgggattcttggtcagtgaggatgaaagcaaactggatccaggcgcagcagaacaagtccctgattttgtcaccttcctttaccaaataactagaggaattgcagcaaggagttatggattaaatgtggctaaactagcagatgttcctggagaaattttgaagaaagcagctcacaagtcaaaagagctggaaggattaataaatacgaaaagaaagagactcaagtattttgcaaagttatggacgatgcataatgcacaagacctgcagaagtggacagaggagttcaacatggaagaaacacagacttctcttcttcattaaaatgaagactacatttgtgaacaaaaaatggagaattaaaaataccaactgtacaaaataactctccagtaacagcctatctttgtgtgacatgtgagcataaaattatgaccatggtatattcctattggaaacagagaggtttttctgaagacagtctttttcaagtttctgtcttcctaacttttctacgtataaacactcttgaatagacttccactttgtaattagaaaattttatggacagtaagtccagtaaagccttaagtggcagaatataattcccaagcttttggagggtgatataaaaatttacttgatatttttatttgtttcagttcagataattggcaactgggtgaatctggcaggaatctatccattgaactaaaataattttattatgcaaccagtttatccaccaagaacataagaattttttataagtagaaagaattggccaggcatggtggctcatgcctgtaatcccagcactttgggaggccaaggtaggcagatcacctgaggtcaggagttcaagaccagcctggccaacatggcaaaaccccatctttactaaaaatataaagtacatctctactaaaaatacgaaaaaattagctgggcatggtggcgcacacctgtagtcccagctactccggaggctgaggcaggagaatctcttgaacctgggaggcggaggttgcaatgagccgagatcacgtcactgcactccagcttgggcaacagagcaagactccatctcaaaaaaaaaaaaagaaaaaagaaaagaaatagaattatcaagcttttaaaaactagagcacagaaggaataaggtcatgaaatttaaaaggttaaatattgtcataggattaagcagtttaaagattgttggatgaaattatttgtcattcattcaagtaataaatatttaatgaatacttgctata

SEQ ID NO: 438 - DNA, 3243 bp, Homo sapiens
  source 1..3243: mol_type = genomic DNA
gccacaagcctccaccccagctggtcccccacccaggctgcccagtttaacattcctagtcataggaccttgacttctgagaggcctgattgtcatctgtaaataaggggtaggactaaagcactcctcctggaggactgagagatgggctggaccggagcacttgagtctgggatatgtgaccatgctacctttgtctccctgtcctgttccttcccccagccccaaatccagggttttccaaagtgtggttcaagaaccacctgcatctgaatctagaggtactggatacaaccccacgtctgggccgttacccaggacattctacatgagaacgtgggggtggggccctggctgcacctgaactgtcacctggagtcagggtggaaggtggaagaactgggtcttatttccttctccccttgttctttagggtctgtccttctgcagactccgttaccccaccctaaccatcctgcacacccttggagccctctgggccaatgccctgtcccgcaaagggcttctcaggcatctcacctctatgggagggcatttttggcccccagaaccttacacggtgtttatgtggggaagcccctgggaagcagacagtcctagggtgaagctgagaggcagagagaaggggagacagacagagggtggggctttcccccttgtctccagtgccctttctggtgaccctcggttcttttcccccaccacccccccagcggagcccatcgtggtgaggcttaaggaggtccgactgcagagggacgacttcgagattctgaaggtgatcggacgcggggcgttcagcgaggtagcggtagtgaagatgaagcagacgggccaggtgtatgccatgaagatcatgaacaagtgggacatgctgaagaggggcgaggtgtcgtgcttccgtgaggagagggacgtgttggtgaatggggaccggcggtggatcacgcagctgcacttcgccttccaggatgagaactacctgtacctggtcatggagtattacgtgggcggggacctgctgacactgctgagcaagtttggggagcggattccggccgagatggcgcgcttctacctggcggagattgtcatggccatagactcggtgcaccggcttggctacgtgcacagggacatcaaacccgacaacatcctgctggaccgctgtggccacatccgcctggccgacttcggctcttgcctcaagctgcgggcagatggaacggtgcggtcgctggtggctgtgggcaccccagactacctgtcccccgagatcctgcaggctgtgggcggtgggcctgggacaggcagctacgggcccgagtgtgactggtgggcgctgggtgtattcgcctatgaaatgttctatgggcagacgcccttctacgcggattccacggcggagacctatggcaagatcgtccactacaaggagcacctctctctgccgctggtggacgaaggggtccctgaggaggctcgagacttcattcagcggttgctgtgtcccccggagacacggctgggccggggtggagcaggcgacttccggacacatcccttcttctttggcctcgactgggatggtctccgggacagcgtgcccccctttacaccggatttcgaaggtgccaccgacacatgcaacttcgacttggtggaggacgggctcactgccatggtgagcgggggcggggagacactgtcggacattcgggaaggtgcgccgctaggggtccacctgccttttgtgggctactcctactcctgcatggccctcagggacagtgaggtcccaggccccacacccatggaactggaggccgagcagctgcttgagccacacgtgcaagcgcccagcctggagccctcggtgtccccacaggatgaaacagctgaagtggcagttccagcggctgtccctgcggcagaggctgaggccgaggtgacgctgcgggagctccaggaagccctggaggaggaggtgctcacccggcagagcctgagccgggagatggaggccatccgcacggacaaccagaacttcgccagtcaactacgcgaggcagaggctcggaaccgggacctagaggcacacgtccggcagttgcaggagcggatggagttgctgcaggcagagggagccacagctgtcacgggggtccccagtccccgggccacggatccaccttcccatctagatggccccccggccgtggctgtgggccagtgcccgctggtggggccaggccccatgcaccgccgccacctgctgctccctgccagggtccctaggcctggcctatcggaggcgctttccctgctcctgttcgccgttgttctgtctcgtgccgccgccctgggctgcattgggttggtggcccacgccggccaactcaccgcagtctggcgccgcccaggagccgcccgcgctccctgaaccctagaactgtcttcgactccggggccccgttggaagactgagtgcccggggcacggcacagaagccgcgcccaccgcctgccagttcacaaccgctccgagcgtgggtctccgcccagctccagtcctgtgatccgggcccgccccctagcggccggggagggaggggccgggtccgcggccggcgaacggggctcgaagggtccttgtagccgggaatgctgctgctgctgctgctgctgctgctgctgctgctgctgctgctgctgctgctgctgctggggggatcacagaccatttctttctttcggccaggctgaggccctgacgtggatgggcaaactgcaggcctgggaaggcagcaagccgggccgtccgtgttccatcctccacgcacccccacctatcgttggttcgcaaagtgcaaagctttcttgtgcatgacgccctgctctggggagcgtctggcgcgatctctgcctgcttactcgggaaatttgcttttgccaaacccgctttttcggggatcccgcgcccccctcctcacttgcgctgctctcggagccccagccggctccgcccgcttcggcggtttggatatttattgacctcgtcctccgactcgctgacaggctacaggacccccaacaaccccaatccacgttttggatgcactgagaccccgacattcctcggtatttattgtctgtccccacctaggacccccacccccgaccctcgcgaataaaaggccctccatctgcccaaagctctgga

SEQ ID NO: 439 - DNA, 2647 bp, Homo sapiens
  source 1..2647: mol_type = genomic DNA
agagaggcccaggggacagccagggacaggcagacatgcagccagggctccagggcctggacaggggctgccaggccctgtgacaggaggaccccgagcccccggcccggggaggggccatggtgctgcctgtccaacatgtcagccgaggtgcggctgaggcggctccagcagctggtgttggacccgggcttcctggggctggagcccctgctcgaccttctcctgggcgtccaccaggagctgggcgcctccgaactggcccaggacaagtacgtggccgacttcttgcagtgggcggagcccatcgtggtgaggcttaaggaggtccgactgcagagggacgacttcgagattctgaaggtgatcggacgcggggcgttcagcgaggtagcggtagtgaagatgaagcagacgggccaggtgtatgccatgaagatcatgaacaagtgggacatgctgaagaggggcgaggtgtcgtgcttccgtgaggagagggacgtgttggtgaatggggaccggcggtggatcacgcagctgcacttcgccttccaggatgagaactacctgtacctggtcatggagtattacgtgggcggggacctgctgacactgctgagcaagtttggggagcggattccggccgagatggcgcgcttctacctggcggagattgtcatggccatagactcggtgcaccggcttggctacgtgcacagggacatcaaacccgacaacatcctgctggaccgctgtggccacatccgcctggccgacttcggctcttgcctcaagctgcgggcagatggaacggtgcggtcgctggtggctgtgggcaccccagactacctgtcccccgagatcctgcaggctgtgggcggtgggcctgggacaggcagctacgggcccgagtgtgactggtgggcgctgggtgtattcgcctatgaaatgttctatgggcagacgcccttctacgcggattccacggcggagacctatggcaagatcgtccactacaaggagcacctctctctgccgctggtggacgaaggggtccctgaggaggctcgagacttcattcagcggttgctgtgtcccccggagacacggctgggccggggtggagcaggcgacttccggacacatcccttcttctttggcctcgactgggatggtctccgggacagcgtgcccccctttacaccggatttcgaaggtgccaccgacacatgcaacttcgacttggtggaggacgggctcactgccatggagacactgtcggacattcgggaaggtgcgccgctaggggtccacctgccttttgtgggctactcctactcctgcatggccctcagggacagtgaggtcccaggccccacacccatggaactggaggccgagcagctgcttgagccacacgtgcaagcgcccagcctggagccctcggtgtccccacaggatgaaacagctgaagtggcagttccagcggctgtccctgcggcagaggctgaggccgaggtgacgctgcgggagctccaggaagccctggaggaggaggtgctcacccggcagagcctgagccgggagatggaggccatccgcacggacaaccagaacttcgccagtcaactacgcgaggcagaggctcggaaccgggacctagaggcacacgtccggcagttgcaggagcggatggagttgctgcaggcagagggagccacaggtccctaggcctggcctatcggaggcgctttccctgctcctgttcgccgttgttctgtctcgtgccgccgccctgggctgcattgggttggtggcccacgccggccaactcaccgcagtctggcgccgcccaggagccgcccgcgctccctgaaccctagaactgtcttcgactccggggccccgttggaagactgagtgcccggggcacggcacagaagccgcgcccaccgcctgccagttcacaaccgctccgagcgtgggtctccgcccagctccagtcctgtgatccgggcccgccccctagcggccggggagggaggggccgggtccgcggccggcgaacggggctcgaagggtccttgtagccgggaatgctgctgctgctgctgctgctgctgctgctgctgctgctgctgctgctgctgctgctgctggggggatcacagaccatttctttctttcggccaggctgaggccctgacgtggatgggcaaactgcaggcctgggaaggcagcaagccgggccgtccgtgttccatcctccacgcacccccacctatcgttggttcgcaaagtgcaaagctttcttgtgcatgacgccctgctctggggagcgtctggcgcgatctctgcctgcttactcgggaaatttgcttttgccaaacccgctttttcggggatcccgcgcccccctcctcacttgcgctgctctcggagccccagccggctccgcccgcttcggcggtttggatatttattgacctcgtcctccgactcgctgacaggctacaggacccccaacaaccccaatccacgttttggatgcactgagaccccgacattcctcggtatttattgtctgtccccacctaggacccccacccccgaccctcgcgaataaaaggccctccatctgcccaaa

SEQ ID NO: 440 - DNA, 2780 bp, Homo sapiens
  source 1..2780: mol_type = genomic DNA
agagaggcccaggggacagccagggacaggcagacatgcagccagggctccagggcctggacaggggctgccaggccctgtgacaggaggaccccgagcccccggcccggggaggggccatggtgctgcctgtccaacatgtcagccgaggtgcggctgaggcggctccagcagctggtgttggacccgggcttcctggggctggagcccctgctcgaccttctcctgggcgtccaccaggagctgggcgcctccgaactggcccaggacaagtacgtggccgacttcttgcagtgggcggagcccatcgtggtgaggcttaaggaggtccgactgcagagggacgacttcgagattctgaaggtgatcggacgcggggcgttcagcgaggtagcggtagtgaagatgaagcagacgggccaggtgtatgccatgaagatcatgaacaagtgggacatgctgaagaggggcgaggtgtcgtgcttccgtgaggagagggacgtgttggtgaatggggaccggcggtggatcacgcagctgcacttcgccttccaggatgagaactacctgtacctggtcatggagtattacgtgggcggggacctgctgacactgctgagcaagtttggggagcggattccggccgagatggcgcgcttctacctggcggagattgtcatggccatagactcggtgcaccggcttggctacgtgcacagggacatcaaacccgacaacatcctgctggaccgctgtggccacatccgcctggccgacttcggctcttgcctcaagctgcgggcagatggaacggtgcggtcgctggtggctgtgggcaccccagactacctgtcccccgagatcctgcaggctgtgggcggtgggcctgggacaggcagctacgggcccgagtgtgactggtgggcgctgggtgtattcgcctatgaaatgttctatgggcagacgcccttctacgcggattccacggcggagacctatggcaagatcgtccactacaaggagcacctctctctgccgctggtggacgaaggggtccctgaggaggctcgagacttcattcagcggttgctgtgtcccccggagacacggctgggccggggtggagcaggcgacttccggacacatcccttcttctttggcctcgactgggatggtctccgggacagcgtgcccccctttacaccggatttcgaaggtgccaccgacacatgcaacttcgacttggtggaggacgggctcactgccatggagacactgtcggacattcgggaaggtgcgccgctaggggtccacctgccttttgtgggctactcctactcctgcatggccctcagggacagtgaggtcccaggccccacacccatggaactggaggccgagcagctgcttgagccacacgtgcaagcgcccagcctggagccctcggtgtccccacaggatgaaacagctgaagtggcagttccagcggctgtccctgcggcagaggctgaggccgaggtgacgctgcgggagctccaggaagccctggaggaggaggtgctcacccggcagagcctgagccgggagatggaggccatccgcacggacaaccagaacttcgccagtcaactacgcgaggcagaggctcggaaccgggacctagaggcacacgtccggcagttgcaggagcggatggagttgctgcaggcagagggagccacagctgtcacgggggtccccagtccccgggccacggatccaccttcccatatggccccccggccgtggctgtgggccagtgcccgctggtggggccaggccccatgcaccgccgccacctgctgctccctgccagggtccctaggcctggcctatcggaggcgctttccctgctcctgttcgccgttgttctgtctcgtgccgccgccctgggctgcattgggttggtggcccacgccggccaactcaccgcagtctggcgccgcccaggagccgcccgcgctccctgaaccctagaactgtcttcgactccggggccccgttggaagactgagtgcccggggcacggcacagaagccgcgcccaccgcctgccagttcacaaccgctccgagcgtgggtctccgcccagctccagtcctgtgatccgggcccgccccctagcggccggggagggaggggccgggtccgcggccggcgaacggggctcgaagggtccttgtagccgggaatgctgctgctgctgctgctgctgctgctgctgctgctgctgctgctgctgctgctgctgctggggggatcacagaccatttctttctttcggccaggctgaggccctgacgtggatgggcaaactgcaggcctgggaaggcagcaagccgggccgtccgtgttccatcctccacgcacccccacctatcgttggttcgcaaagtgcaaagctttcttgtgcatgacgccctgctctggggagcgtctggcgcgatctctgcctgcttactcgggaaatttgcttttgccaaacccgctttttcggggatcccgcgcccccctcctcacttgcgctgctctcggagccccagccggctccgcccgcttcggcggtttggatatttattgacctcgtcctccgactcgctgacaggctacaggacccccaacaaccccaatccacgttttggatgcactgagaccccgacattcctcggtatttattgtctgtccccacctaggacccccacccccgaccctcgcgaataaaaggccctccatctgcccaaa

SEQ ID NO: 441 - DNA, 2784 bp, Homo sapiens
  source 1..2784: mol_type = genomic DNA
agagaggcccaggggacagccagggacaggcagacatgcagccagggctccagggcctggacaggggctgccaggccctgtgacaggaggaccccgagcccccggcccggggaggggccatggtgctgcctgtccaacatgtcagccgaggtgcggctgaggcggctccagcagctggtgttggacccgggcttcctggggctggagcccctgctcgaccttctcctgggcgtccaccaggagctgggcgcctccgaactggcccaggacaagtacgtggccgacttcttgcagtgggcggagcccatcgtggtgaggcttaaggaggtccgactgcagagggacgacttcgagattctgaaggtgatcggacgcggggcgttcagcgaggtagcggtagtgaagatgaagcagacgggccaggtgtatgccatgaagatcatgaacaagtgggacatgctgaagaggggcgaggtgtcgtgcttccgtgaggagagggacgtgttggtgaatggggaccggcggtggatcacgcagctgcacttcgccttccaggatgagaactacctgtacctggtcatggagtattacgtgggcggggacctgctgacactgctgagcaagtttggggagcggattccggccgagatggcgcgcttctacctggcggagattgtcatggccatagactcggtgcaccggcttggctacgtgcacagggacatcaaacccgacaacatcctgctggaccgctgtggccacatccgcctggccgacttcggctcttgcctcaagctgcgggcagatggaacggtgcggtcgctggtggctgtgggcaccccagactacctgtcccccgagatcctgcaggctgtgggcggtgggcctgggacaggcagctacgggcccgagtgtgactggtgggcgctgggtgtattcgcctatgaaatgttctatgggcagacgcccttctacgcggattccacggcggagacctatggcaagatcgtccactacaaggagcacctctctctgccgctggtggacgaaggggtccctgaggaggctcgagacttcattcagcggttgctgtgtcccccggagacacggctgggccggggtggagcaggcgacttccggacacatcccttcttctttggcctcgactgggatggtctccgggacagcgtgcccccctttacaccggatttcgaaggtgccaccgacacatgcaacttcgacttggtggaggacgggctcactgccatggagacactgtcggacattcgggaaggtgcgccgctaggggtccacctgccttttgtgggctactcctactcctgcatggccctcagggacagtgaggtcccaggccccacacccatggaactggaggccgagcagctgcttgagccacacgtgcaagcgcccagcctggagccctcggtgtccccacaggatgaaacagctgaagtggcagttccagcggctgtccctgcggcagaggctgaggccgaggtgacgctgcgggagctccaggaagccctggaggaggaggtgctcacccggcagagcctgagccgggagatggaggccatccgcacggacaaccagaacttcgccagtcaactacgcgaggcagaggctcggaaccgggacctagaggcacacgtccggcagttgcaggagcggatggagttgctgcaggcagagggagccacagctgtcacgggggtccccagtccccgggccacggatccaccttcccatctagatggccccccggccgtggctgtgggccagtgcccgctggtggggccaggccccatgcaccgccgccacctgctgctccctgccagggtccctaggcctggcctatcggaggcgctttccctgctcctgttcgccgttgttctgtctcgtgccgccgccctgggctgcattgggttggtggcccacgccggccaactcaccgcagtctggcgccgcccaggagccgcccgcgctccctgaaccctagaactgtcttcgactccggggccccgttggaagactgagtgcccggggcacggcacagaagccgcgcccaccgcctgccagttcacaaccgctccgagcgtgggtctccgcccagctccagtcctgtgatccgggcccgccccctagcggccggggagggaggggccgggtccgcggccggcgaacggggctcgaagggtccttgtagccgggaatgctgctgctgctgctgctgctgctgctgctgctgctgctgctgctgctgctgctgctgctggggggatcacagaccatttctttctttcggccaggctgaggccctgacgtggatgggcaaactgcaggcctgggaaggcagcaagccgggccgtccgtgttccatcctccacgcacccccacctatcgttggttcgcaaagtgcaaagctttcttgtgcatgacgccctgctctggggagcgtctggcgcgatctctgcctgcttactcgggaaatttgcttttgccaaacccgctttttcggggatcccgcgcccccctcctcacttgcgctgctctcggagccccagccggctccgcccgcttcggcggtttggatatttattgacctcgtcctccgactcgctgacaggctacaggacccccaacaaccccaatccacgttttggatgcactgagaccccgacattcctcggtatttattgtctgtccccacctaggacccccacccccgaccctcgcgaataaaaggccctccatctgcccaaa

SEQ ID NO: 442 - DNA, 2799 bp, Homo sapiens
  source 1..2799: mol_type = genomic DNA
agagaggcccaggggacagccagggacaggcagacatgcagccagggctccagggcctggacaggggctgccaggccctgtgacaggaggaccccgagcccccggcccggggaggggccatggtgctgcctgtccaacatgtcagccgaggtgcggctgaggcggctccagcagctggtgttggacccgggcttcctggggctggagcccctgctcgaccttctcctgggcgtccaccaggagctgggcgcctccgaactggcccaggacaagtacgtggccgacttcttgcagtgggcggagcccatcgtggtgaggcttaaggaggtccgactgcagagggacgacttcgagattctgaaggtgatcggacgcggggcgttcagcgaggtagcggtagtgaagatgaagcagacgggccaggtgtatgccatgaagatcatgaacaagtgggacatgctgaagaggggcgaggtgtcgtgcttccgtgaggagagggacgtgttggtgaatggggaccggcggtggatcacgcagctgcacttcgccttccaggatgagaactacctgtacctggtcatggagtattacgtgggcggggacctgctgacactgctgagcaagtttggggagcggattccggccgagatggcgcgcttctacctggcggagattgtcatggccatagactcggtgcaccggcttggctacgtgcacagggacatcaaacccgacaacatcctgctggaccgctgtggccacatccgcctggccgacttcggctcttgcctcaagctgcgggcagatggaacggtgcggtcgctggtggctgtgggcaccccagactacctgtcccccgagatcctgcaggctgtgggcggtgggcctgggacaggcagctacgggcccgagtgtgactggtgggcgctgggtgtattcgcctatgaaatgttctatgggcagacgcccttctacgcggattccacggcggagacctatggcaagatcgtccactacaaggagcacctctctctgccgctggtggacgaaggggtccctgaggaggctcgagacttcattcagcggttgctgtgtcccccggagacacggctgggccggggtggagcaggcgacttccggacacatcccttcttctttggcctcgactgggatggtctccgggacagcgtgcccccctttacaccggatttcgaaggtgccaccgacacatgcaacttcgacttggtggaggacgggctcactgccatggtgagcgggggcggggagacactgtcggacattcgggaaggtgcgccgctaggggtccacctgccttttgtgggctactcctactcctgcatggccctcagggacagtgaggtcccaggccccacacccatggaactggaggccgagcagctgcttgagccacacgtgcaagcgcccagcctggagccctcggtgtccccacaggatgaaacagctgaagtggcagttccagcggctgtccctgcggcagaggctgaggccgaggtgacgctgcgggagctccaggaagccctggaggaggaggtgctcacccggcagagcctgagccgggagatggaggccatccgcacggacaaccagaacttcgccagtcaactacgcgaggcagaggctcggaaccgggacctagaggcacacgtccggcagttgcaggagcggatggagttgctgcaggcagagggagccacagctgtcacgggggtccccagtccccgggccacggatccaccttcccatctagatggccccccggccgtggctgtgggccagtgcccgctggtggggccaggccccatgcaccgccgccacctgctgctccctgccagggtccctaggcctggcctatcggaggcgctttccctgctcctgttcgccgttgttctgtctcgtgccgccgccctgggctgcattgggttggtggcccacgccggccaactcaccgcagtctggcgccgcccaggagccgcccgcgctccctgaaccctagaactgtcttcgactccggggccccgttggaagactgagtgcccggggcacggcacagaagccgcgcccaccgcctgccagttcacaaccgctccgagcgtgggtctccgcccagctccagtcctgtgatccgggcccgccccctagcggccggggagggaggggccgggtccgcggccggcgaacggggctcgaagggtccttgtagccgggaatgctgctgctgctgctgctgctgctgctgctgctgctgctgctgctgctgctgctgctgctggggggatcacagaccatttctttctttcggccaggctgaggccctgacgtggatgggcaaactgcaggcctgggaaggcagcaagccgggccgtccgtgttccatcctccacgcacccccacctatcgttggttcgcaaagtgcaaagctttcttgtgcatgacgccctgctctggggagcgtctggcgcgatctctgcctgcttactcgggaaatttgcttttgccaaacccgctttttcggggatcccgcgcccccctcctcacttgcgctgctctcggagccccagccggctccgcccgcttcggcggtttggatatttattgacctcgtcctccgactcgctgacaggctacaggacccccaacaaccccaatccacgttttggatgcactgagaccccgacattcctcggtatttattgtctgtccccacctaggacccccacccccgaccctcgcgaataaaaggccctccatctgcccaaa

SEQ ID NO: 443 - DNA, 2858 bp, Homo sapiens
  source 1..2858: mol_type = genomic DNA
agagaggcccaggggacagccagggacaggcagacatgcagccagggctccagggcctggacaggggctgccaggccctgtgacaggaggaccccgagcccccggcccggggaggggccatggtgctgcctgtccaacatgtcagccgaggtgcggctgaggcggctccagcagctggtgttggacccgggcttcctggggctggagcccctgctcgaccttctcctgggcgtccaccaggagctgggcgcctccgaactggcccaggacaagtacgtggccgacttcttgcagtgggccccaaatccagggttttccaaagtgtggttcaagaaccacctgcatctgaatctagagcggagcccatcgtggtgaggcttaaggaggtccgactgcagagggacgacttcgagattctgaaggtgatcggacgcggggcgttcagcgaggtagcggtagtgaagatgaagcagacgggccaggtgtatgccatgaagatcatgaacaagtgggacatgctgaagaggggcgaggtgtcgtgcttccgtgaggagagggacgtgttggtgaatggggaccggcggtggatcacgcagctgcacttcgccttccaggatgagaactacctgtacctggtcatggagtattacgtgggcggggacctgctgacactgctgagcaagtttggggagcggattccggccgagatggcgcgcttctacctggcggagattgtcatggccatagactcggtgcaccggcttggctacgtgcacagggacatcaaacccgacaacatcctgctggaccgctgtggccacatccgcctggccgacttcggctcttgcctcaagctgcgggcagatggaacggtgcggtcgctggtggctgtgggcaccccagactacctgtcccccgagatcctgcaggctgtgggcggtgggcctgggacaggcagctacgggcccgagtgtgactggtgggcgctgggtgtattcgcctatgaaatgttctatgggcagacgcccttctacgcggattccacggcggagacctatggcaagatcgtccactacaaggagcacctctctctgccgctggtggacgaaggggtccctgaggaggctcgagacttcattcagcggttgctgtgtcccccggagacacggctgggccggggtggagcaggcgacttccggacacatcccttcttctttggcctcgactgggatggtctccgggacagcgtgcccccctttacaccggatttcgaaggtgccaccgacacatgcaacttcgacttggtggaggacgggctcactgccatggtgagcgggggcggggagacactgtcggacattcgggaaggtgcgccgctaggggtccacctgccttttgtgggctactcctactcctgcatggccctcagggacagtgaggtcccaggccccacacccatggaactggaggccgagcagctgcttgagccacacgtgcaagcgcccagcctggagccctcggtgtccccacaggatgaaacagctgaagtggcagttccagcggctgtccctgcggcagaggctgaggccgaggtgacgctgcgggagctccaggaagccctggaggaggaggtgctcacccggcagagcctgagccgggagatggaggccatccgcacggacaaccagaacttcgccagtcaactacgcgaggcagaggctcggaaccgggacctagaggcacacgtccggcagttgcaggagcggatggagttgctgcaggcagagggagccacagctgtcacgggggtccccagtccccgggccacggatccaccttcccatctagatggccccccggccgtggctgtgggccagtgcccgctggtggggccaggccccatgcaccgccgccacctgctgctccctgccagggtccctaggcctggcctatcggaggcgctttccctgctcctgttcgccgttgttctgtctcgtgccgccgccctgggctgcattgggttggtggcccacgccggccaactcaccgcagtctggcgccgcccaggagccgcccgcgctccctgaaccctagaactgtcttcgactccggggccccgttggaagactgagtgcccggggcacggcacagaagccgcgcccaccgcctgccagttcacaaccgctccgagcgtgggtctccgcccagctccagtcctgtgatccgggcccgccccctagcggccggggagggaggggccgggtccgcggccggcgaacggggctcgaagggtccttgtagccgggaatgctgctgctgctgctgctgctgctgctgctgctgctgctgctgctgctgctgctgctgctggggggatcacagaccatttctttctttcggccaggctgaggccctgacgtggatgggcaaactgcaggcctgggaaggcagcaagccgggccgtccgtgttccatcctccacgcacccccacctatcgttggttcgcaaagtgcaaagctttcttgtgcatgacgccctgctctggggagcgtctggcgcgatctctgcctgcttactcgggaaatttgcttttgccaaacccgctttttcggggatcccgcgcccccctcctcacttgcgctgctctcggagccccagccggctccgcccgcttcggcggtttggatatttattgacctcgtcctccgactcgctgacaggctacaggacccccaacaaccccaatccacgttttggatgcactgagaccccgacattcctcggtatttattgtctgtccccacctaggacccccacccccgaccctcgcgaataaaaggccctccatctgcccaaa

SEQ ID NO: 444 - DNA, 2502 bp, Homo sapiens
  source 1..2502: mol_type = genomic DNA
ggggccacggctgggtgcagaagcgggtggagttgggtctgggcgagcccttttgttttcccgccgtctccactctgtctcactatctcgacctcaggtagcggtagtgaagatgaagcagacgggccaggtgtatgccatgaagatcatgaacaagtgggacatgctgaagaggggcgaggtgtcgtgcttccgtgaggagagggacgtgttggtgaatggggaccggcggtggatcacgcagctgcacttcgccttccaggatgagaactacctgtacctggtcatggagtattacgtgggcggggacctgctgacactgctgagcaagtttggggagcggattccggccgagatggcgcgcttctacctggcggagattgtcatggccatagactcggtgcaccggcttggctacgtgcacagggacatcaaacccgacaacatcctgctggaccgctgtggccacatccgcctggccgacttcggctcttgcctcaagctgcgggcagatggaacggtgcggtcgctggtggctgtgggcaccccagactacctgtcccccgagatcctgcaggctgtgggcggtgggcctgggacaggcagctacgggcccgagtgtgactggtgggcgctgggtgtattcgcctatgaaatgttctatgggcagacgcccttctacgcggattccacggcggagacctatggcaagatcgtccactacaaggagcacctctctctgccgctggtggacgaaggggtccctgaggaggctcgagacttcattcagcggttgctgtgtcccccggagacacggctgggccggggtggagcaggcgacttccggacacatcccttcttctttggcctcgactgggatggtctccgggacagcgtgcccccctttacaccggatttcgaaggtgccaccgacacatgcaacttcgacttggtggaggacgggctcactgccatggtgagcgggggcggggagacactgtcggacattcgggaaggtgcgccgctaggggtccacctgccttttgtgggctactcctactcctgcatggccctcagggacagtgaggtcccaggccccacacccatggaactggaggccgagcagctgcttgagccacacgtgcaagcgcccagcctggagccctcggtgtccccacaggatgaaacagctgaagtggcagttccagcggctgtccctgcggcagaggctgaggccgaggtgacgctgcgggagctccaggaagccctggaggaggaggtgctcacccggcagagcctgagccgggagatggaggccatccgcacggacaaccagaacttcgccagtcaactacgcgaggcagaggctcggaaccgggacctagaggcacacgtccggcagttgcaggagcggatggagttgctgcaggcagagggagccacagctgtcacgggggtccccagtccccgggccacggatccaccttcccatatggccccccggccgtggctgtgggccagtgcccgctggtggggccaggccccatgcaccgccgccacctgctgctccctgccagggtccctaggcctggcctatcggaggcgctttccctgctcctgttcgccgttgttctgtctcgtgccgccgccctgggctgcattgggttggtggcccacgccggccaactcaccgcagtctggcgccgcccaggagccgcccgcgctccctgaaccctagaactgtcttcgactccggggccccgttggaagactgagtgcccggggcacggcacagaagccgcgcccaccgcctgccagttcacaaccgctccgagcgtgggtctccgcccagctccagtcctgtgatccgggcccgccccctagcggccggggagggaggggccgggtccgcggccggcgaacggggctcgaagggtccttgtagccgggaatgctgctgctgctgctgctgctgctgctgctgctgctgctgctgctgctgctgctgctgctggggggatcacagaccatttctttctttcggccaggctgaggccctgacgtggatgggcaaactgcaggcctgggaaggcagcaagccgggccgtccgtgttccatcctccacgcacccccacctatcgttggttcgcaaagtgcaaagctttcttgtgcatgacgccctgctctggggagcgtctggcgcgatctctgcctgcttactcgggaaatttgcttttgccaaacccgctttttcggggatcccgcgcccccctcctcacttgcgctgctctcggagccccagccggctccgcccgcttcggcggtttggatatttattgacctcgtcctccgactcgctgacaggctacaggacccccaacaaccccaatccacgttttggatgcactgagaccccgacattcctcggtatttattgtctgtccccacctaggacccccacccccgaccctcgcgaataaaaggccctccatctgcccaaa

SEQ ID NO: 445 - DNA, 13822 bp, Homo sapiens
  source 1..13822: mol_type = genomic DNA
ggcagtaatagaatgctttcaggaagatgacagaatcaggagaaagatgctgttttgcactatcttgatttgttacagcagccaacttattggcatgatggagtgacaggaaaaacagctggcatggaagatgaaagagaagatgttcaaaagaaaacattcacaaaatgggtaaatgcacaattttctaagtttgggaagcagcatattgagaacctcttcagtgacctacaggatgggaggcgcctcctagacctcctcgaaggcctgacagggcaaaaactgccaaaagaaaaaggatccacaagagttcatgccctgaacaatgtcaacaaggcactgcgggttttgcagaacaataatgttgatttagtgaatattggaagtactgacatcgtagatggaaatcataaactgactcttggtttgatttggaatataatcctccactggcaggtcaaaaatgtaatgaaaaatatcatggctggattgcaacaaaccaacagtgaaaagattctcctgagctgggtccgacaatcaactcgtaattatccacaggttaatgtaatcaacttcaccaccagctggtctgatggcctggctttgaatgctctcatccatagtcataggccagacctatttgactggaatagtgtggtttgccagcagtcagccacacaacgactggaacatgcattcaacatcgccagatatcaattaggcatagagaaactactcgatcctgaagatgttgataccacctatccagataagaagtccatcttaatgtacatcacatcactcttccaagttttgcctcaacaagtgagcattgaagccatccaggaagtggaaatgttgccaaggccacctaaagtgactaaagaagaacattttcagttacatcatcaaatgcactattctcaacagatcacggtcagtctagcacagggatatgagagaacttcttcccctaagcctcgattcaagagctatgcctacacacaggctgcttatgtcaccacctctgaccctacacggagcccatttccttcacagcatttggaagctcctgaagacaagtcatttggcagttcattgatggagagtgaagtaaacctggaccgttatcaaacagctttagaagaagtattatcgtggcttctttctgctgaggacacattgcaagcacaaggagagatttctaatgatgtggaagtggtgaaagaccagtttcatactcatgaggggtacatgatggatttgacagcccatcagggccgggttggtaatattctacaattgggaagtaagctgattggaacaggaaaattatcagaagatgaagaaactgaagtacaagagcagatgaatctcctaaattcaagatgggaatgcctcagggtagctagcatggaaaaacaaagcaatttacatagagttttaatggatctccagaatcagaaactgaaagagttgaatgactggctaacaaaaacagaagaaagaacaaggaaaatggaggaagagcctcttggacctgatcttgaagacctaaaacgccaagtacaacaacataaggtgcttcaagaagatctagaacaagaacaagtcagggtcaattctctcactcacatggtggtggtagttgatgaatctagtggagatcacgcaactgctgctttggaagaacaacttaaggtattgggagatcgatgggcaaacatctgtagatggacagaagaccgctgggttcttttacaagacatccttctcaaatggcaacgtcttactgaagaacagtgcctttttagtgcatggctttcagaaaaagaagatgcagtgaacaagattcacacaactggctttaaagatcaaaatgaaatgttatcaagtcttcaaaaactggccgttttaaaagcggatctagaaaagaaaaagcaatccatgggcaaactgtattcactcaaacaagatcttctttcaacactgaagaataagtcagtgacccagaagacggaagcatggctggataactttgcccggtgttgggataatttagtccaaaaacttgaaaagagtacagcacagatttcacaggctgtcaccaccactcagccatcactaacacagacaactgtaatggaaacagtaactacggtgaccacaagggaacagatcctggtaaagcatgctcaagaggaacttccaccaccacctccccaaaagaagaggcagattactgtggattctgaaattaggaaaaggttggatgttgatataactgaacttcacagctggattactcgctcagaagctgtgttgcagagtcctgaatttgcaatctttcggaaggaaggcaacttctcagacttaaaagaaaaagtcaatgccatagagcgagaaaaagctgagaagttcagaaaactgcaagatgccagcagatcagctcaggccctggtggaacagatggtgaatgagggtgttaatgcagatagcatcaaacaagcctcagaacaactgaacagccggtggatcgaattctgccagttgctaagtgagagacttaactggctggagtatcagaacaacatcatcgctttctataatcagctacaacaattggagcagatgacaactactgctgaaaactggttgaaaatccaacccaccaccccatcagagccaacagcaattaaaagtcagttaaaaatttgtaaggatgaagtcaaccggctatcagatcttcaacctcaaattgaacgattaaaaattcaaagcatagccctgaaagagaaaggacaaggacccatgttcctggatgcagactttgtggcctttacaaatcattttaagcaagtcttttctgatgtgcaggccagagagaaagagctacagacaatttttgacactttgccaccaatgcgctatcaggagaccatgagtgccatcaggacatgggtccagcagtcagaaaccaaactctccatacctcaacttagtgtcaccgactatgaaatcatggagcagagactcggggaattgcaggctttacaaagttctctgcaagagcaacaaagtggcctatactatctcagcaccactgtgaaagagatgtcgaagaaagcgccctctgaaattagccggaaatatcaatcagaatttgaagaaattgagggacgctggaagaagctctcctcccagctggttgagcattgtcaaaagctagaggagcaaatgaataaactccgaaaaattcagaatcacatacaaaccctgaagaaatggatggctgaagttgatgtttttctgaaggaggaatggcctgcccttggggattcagaaattctaaaaaagcagctgaaacagtgcagacttttagtcagtgatattcagacaattcagcccagtctaaacagtgtcaatgaaggtgggcagaagataaagaatgaagcagagccagagtttgcttcgagacttgagacagaactcaaagaacttaacactcagtgggatcacatgtgccaacaggtctatgccagaaaggaggccttgaagggaggtttggagaaaactgtaagcctccagaaagatctatcagagatgcacgaatggatgacacaagctgaagaagagtatcttgagagagattttgaatataaaactccagatgaattacagaaagcagttgaagagatgaagagagctaaagaagaggcccaacaaaaagaagcgaaagtgaaactccttactgagtctgtaaatagtgtcatagctcaagctccacctgtagcacaagaggccttaaaaaaggaacttgaaactctaaccaccaactaccagtggctctgcactaggctgaatgggaaatgcaagactttggaagaagtttgggcatgttggcatgagttattgtcatacttggagaaagcaaacaagtggctaaatgaagtagaatttaaacttaaaaccactgaaaacattcctggcggagctgaggaaatctctgaggtgctagattcacttgaaaatttgatgcgacattcagaggataacccaaatcagattcgcatattggcacagaccctaacagatggcggagtcatggatgagctaatcaatgaggaacttgagacatttaattctcgttggagggaactacatgaagaggctgtaaggaggcaaaagttgcttgaacagagcatccagtctgcccaggagactgaaaaatccttacacttaatccaggagtccctcacattcattgacaagcagttggcagcttatattgcagacaaggtggacgcagctcaaatgcctcaggaagcccagaaaatccaatctgatttgacaagtcatgagatcagtttagaagaaatgaagaaacataatcaggggaaggaggctgcccaaagagtcctgtctcagattgatgttgcacagaaaaaattacaagatgtctccatgaagtttcgattattccagaaaccagccaattttgagcagcgtctacaagaaagtaagatgattttagatgaagtgaagatgcacttgcctgcattggaaacaaagagtgtggaacaggaagtagtacagtcacagctaaatcattgtgtgaacttgtataaaagtctgagtgaagtgaagtctgaagtggaaatggtgataaagactggacgtcagattgtacagaaaaagcagacggaaaatcccaaagaacttgatgaaagagtaacagctttgaaattgcattataatgagctgggagcaaaggtaacagaaagaaagcaacagttggagaaatgcttgaaattgtcccgtaagatgcgaaaggaaatgaatgtcttgacagaatggctggcagctacagatatggaattgacaaagagatcagcagttgaaggaatgcctagtaatttggattctgaagttgcctggggaaaggctactcaaaaagagattgagaaacagaaggtgcacctgaagagtatcacagaggtaggagaggccttgaaaacagttttgggcaagaaggagacgttggtggaagataaactcagtcttctgaatagtaactggatagctgtcacctcccgagcagaagagtggttaaatcttttgttggaataccagaaacacatggaaacttttgaccagaatgtggaccacatcacaaagtggatcattcaggctgacacacttttggatgaatcagagaaaaagaaaccccagcaaaaagaagacgtgcttaagcgtttaaaggcagaactgaatgacatacgcccaaaggtggactctacacgtgaccaagcagcaaacttgatggcaaaccgcggtgaccactgcaggaaattagtagagccccaaatctcagagctcaaccatcgatttgcagccatttcacacagaattaagactggaaaggcctccattcctttgaaggaattggagcagtttaactcagatatacaaaaattgcttgaaccactggaggctgaaattcagcagggggtgaatctgaaagaggaagacttcaataaagatatgaatgaagacaatgagggtactgtaaaagaattgttgcaaagaggagacaacttacaacaaagaatcacagatgagagaaagcgagaggaaataaagataaaacagcagctgttacagacaaaacataatgctctcaaggatttgaggtctcaaagaagaaaaaaggctctagaaatttctcatcagtggtatcagtacaagaggcaggctgatgatctcctgaaatgcttggatgacattgaaaaaaaattagccagcctacctgagcccagagatgaaaggaaaataaaggaaattgatcgggaattgcagaagaagaaagaggagctgaatgcagtgcgtaggcaagctgagggcttgtctgaggatggggccgcaatggcagtggagccaactcagatccagctcagcaagcgctggcgggaaattgagagcaaatttgctcagtttcgaagactcaactttgcacaaattcacactgtccgtgaagaaacgatgatggtgatgactgaagacatgcctttggaaatttcttatgtgccttctacttatttgactgaaatcactcatgtctcacaagccctattagaagtggaacaacttctcaatgctcctgacctctgtgctaaggactttgaagatctctttaagcaagaggagtctctgaagaatataaaagatagtctacaacaaagctcaggtcggattgacattattcatagcaagaagacagcagcattgcaaagtgcaacgcctgtggaaagggtgaagctacaggaagctctctcccagcttgatttccaatgggaaaaagttaacaaaatgtacaaggaccgacaagggcgatttgacagatctgttgagaaatggcggcgttttcattatgatataaagatatttaatcagtggctaacagaagctgaacagtttctcagaaagacacaaattcctgagaattgggaacatgctaaatacaaatggtatcttaaggaactccaggatggcattgggcagcggcaaactgttgtcagaacattgaatgcaactggggaagaaataattcagcaatcctcaaaaacagatgccagtattctacaggaaaaattgggaagcctgaatctgcggtggcaggaggtctgcaaacagctgtcagacagaaaaaagaggctagaagaacaaaagaatatcttgtcagaatttcaaagagatttaaatgaatttgttttatggttggaggaagcagataacattgctagtatcccacttgaacctggaaaagagcagcaactaaaagaaaagcttgagcaagtcaagttactggtggaagagttgcccctgcgccagggaattctcaaacaattaaatgaaactggaggacccgtgcttgtaagtgctcccataagcccagaagagcaagataaacttgaaaataagctcaagcagacaaatctccagtggataaaggtttccagagctttacctgagaaacaaggagaaattgaagctcaaataaaagaccttgggcagcttgaaaaaaagcttgaagaccttgaagagcagttaaatcatctgctgctgtggttatctcctattaggaatcagttggaaatttataaccaaccaaaccaagaaggaccatttgacgttaaggaaactgaaatagcagttcaagctaaacaaccggatgtggaagagattttgtctaaagggcagcatttgtacaaggaaaaaccagccactcagccagtgaagaggaagttagaagatctgagctctgagtggaaggcggtaaaccgtttacttcaagagctgagggcaaagcagcctgacctagctcctggactgaccactattggagcctctcctactcagactgttactctggtgacacaacctgtggttactaaggaaactgccatctccaaactagaaatgccatcttccttgatgttggaggtacctgctctggcagatttcaaccgggcttggacagaacttaccgactggctttctctgcttgatcaagttataaaatcacagagggtgatggtgggtgaccttgaggatatcaacgagatgatcatcaagcagaaggcaacaatgcaggatttggaacagaggcgtccccagttggaagaactcattaccgctgcccaaaatttgaaaaacaagaccagcaatcaagaggctagaacaatcattacggatcgaattgaaagaattcagaatcagtgggatgaagtacaagaacaccttcagaaccggaggcaacagttgaatgaaatgttaaaggattcaacacaatggctggaagctaaggaagaagctgagcaggtcttaggacaggccagagccaagcttgagtcatggaaggagggtccctatacagtagatgcaatccaaaagaaaatcacagaaaccaagcagttggccaaagacctccgccagtggcagacaaatgtagatgtggcaaatgacttggccctgaaacttctccgggattattctgcagatgataccagaaaagtccacatgataacagagaatatcaatgcctcttggagaagcattcataaaagggtgagtgagcgagaggctgctttggaagaaactcatagattactgcaacagttccccctggacctggaaaagtttcttgcctggcttacagaagctgaaacaactgccaatgtcctacaggatgctacccgtaaggaaaggctcctagaagactccaagggagtaaaagagctgatgaaacaatggcaagacctccaaggtgaaattgaagctcacacagatgtttatcacaacctggatgaaaacagccaaaaaatcctgagatccctggaaggttccgatgatgcagtcctgttacaaagacgtttggataacatgaacttcaagtggagtgaacttcggaaaaagtctctcaacattaggtcccatttggaagccagttctgaccagtggaagcgtctgcacctttctctgcaggaacttctggtgtggctacagctgaaagatgatgaattaagccggcaggcacctattggaggcgactttccagcagttcagaagcagaacgatgtacatagggccttcaagagggaattgaaaactaaagaacctgtaatcatgagtactcttgagactgtacgaatatttctgacagagcagcctttggaaggactagagaaactctaccaggagcccagagagctgcctcctgaggagagagcccagaatgtcactcggcttctacgaaagcaggctgaggaggtcaatactgagtgggaaaaattgaacctgcactccgctgactggcagagaaaaatagatgagacccttgaaagactccgggaacttcaagaggccacggatgagctggacctcaagctgcgccaagctgaggtgatcaagggatcctggcagcccgtgggcgatctcctcattgactctctccaagatcacctcgagaaagtcaaggcacttcgaggagaaattgcgcctctgaaagagaacgtgagccacgtcaatgaccttgctcgccagcttaccactttgggcattcagctctcaccgtataacctcagcactctggaagacctgaacaccagatggaagcttctgcaggtggccgtcgaggaccgagtcaggcagctgcatgaagcccacagggactttggtccagcatctcagcactttctttccacgtctgtccagggtccctgggagagagccatctcgccaaacaaagtgccctactatatcaaccacgagactcaaacaacttgctgggaccatcccaaaatgacagagctctaccagtctttagctgacctgaataatgtcagattctcagcttataggactgccatgaaactccgaagactgcagaaggccctttgcttggatctcttgagcctgtcagctgcatgtgatgccttggaccagcacaacctcaagcaaaatgaccagcccatggatatcctgcagattattaattgtttgaccactatttatgaccgcctggagcaagagcacaacaatttggtcaacgtccctctctgcgtggatatgtgtctgaactggctgctgaatgtttatgatacgggacgaacagggaggatccgtgtcctgtcttttaaaactggcatcatttccctgtgtaaagcacatttggaagacaagtacagataccttttcaagcaagtggcaagttcaacaggattttgtgaccagcgcaggctgggcctccttctgcatgattctatccaaattccaagacagttgggtgaagttgcatcctttgggggcagtaacattgagccaagtgtccggagctgcttccaatttgctaataataagccagagatcgaagcggccctcttcctagactggatgagactggaaccccagtccatggtgtggctgcccgtcctgcacagagtggctgctgcagaaactgccaagcatcaggccaaatgtaacatctgcaaagagtgtccaatcattggattcaggtacaggagtctaaagcactttaattatgacatctgccaaagctgctttttttctggtcgagttgcaaaaggccataaaatgcactatcccatggtggaatattgcactccgactacatcaggagaagatgttcgagactttgccaaggtactaaaaaacaaatttcgaaccaaaaggtattttgcgaagcatccccgaatgggctacctgccagtgcagactgtcttagagggggacaacatggaaactcccgttactctgatcaacttctggccagtagattctgcgcctgcctcgtcccctcagctttcacacgatgatactcattcacgcattgaacattatgctagcaggctagcagaaatggaaaacagcaatggatcttatctaaatgatagcatctctcctaatgagagcatagatgatgaacatttgttaatccagcattactgccaaagtttgaaccaggactcccccctgagccagcctcgtagtcctgcccagatcttgatttccttagagagtgaggaaagaggggagctagagagaatcctagcagatcttgaggaagaaaacaggaatctgcaagcagaatatgaccgtctaaagcagcagcacgaacataaaggcctgtccccactgccgtcccctcctgaaatgatgcccacctctccccagagtccccgggatgctgagctcattgctgaggccaagctactgcgtcaacacaaaggccgcctggaagccaggatgcaaatcctggaagaccacaataaacagctggagtcacagttacacaggctaaggcagctgctggagcaaccccaggcagaggccaaagtgaatggcacaacggtgtcctctccttctacctctctacagaggtccgacagcagtcagcctatgctgctccgagtggttggcagtcaaacttcggactccatgggtgaggaagatcttctcagtcctccccaggacacaagcacagggttagaggaggtgatggagcaactcaacaactccttccctagttcaagaggacacaatgtaggaagtcttttccacatggcagatgatttgggcagagcgatggagtccttagtatcagtcatgacagatgaagaaggagcagaataaatgttttacaactcctgattcccgcatggtttttataatattcatacaacaaagaggattagacagtaagagtttacaagaaataaatctatatttttgtgaagggtagtggtattatactgtagatttcagtagtttctaagtctgttattgttttgttaacaatggcaggttttacacgtctatgcaattgtacaaaaaagttataagaaaactacatgtaaaatcttgatagctaaataacttgccatttctttatatggaacgcattttgggttgtttaaaaatttataacagttataaagaaagattgtaaactaaagtgtgctttataaaaaaaagttgtttataaaaacccctaaaaacaaaacaaacacacacacacacacatacacacacacacacaaaactttgaggcagcgcattgttttgcatccttttggcgtgatatccatatgaaattcatggctttttctttttttgcatattaaagataagacttcctctaccaccacaccaaatgactactacacactgctcatttgagaactgtcagctgagtggggcaggcttgagttttcatttcatatatctatatgtctataagtatataaatactatagttatatagataaagagatacgaatttctatagactgactttttccattttttaaatgttcatgtcacatcctaatagaaagaaattacttctagtcagtcatccaggcttacctgcttggtctagaatggatttttcccggagccggaagccaggaggaaactacaccacactaaaacattgtctacagctccagatgtttctcattttaaacaactttccactgacaacgaaagtaaagtaaagtattggatttttttaaagggaacatgtgaatgaatacacaggacttattatatcagagtgagtaatcggttggttggttgattgattgattgattgatacattcagcttcctgctgctagcaatgccacgatttagatttaatgatgcttcagtggaaatcaatcagaaggtattctgaccttgtgaacatcagaaggtattttttaactcccaagcagtagcaggacgatgatagggctggagggctatggattcccagcccatccctgtgaaggagtaggccactctttaagtgaaggattggatgattgttcataatacataaagttctctgtaattacaactaaattattatgccctcttctcacagtcaaaaggaactgggtggtttggtttttgttgcttttttagatttattgtcccatgtgggatgagtttttaaatgccacaagacataatttaaaataaataaactttgggaaaaggtgtaaaacagtagccccatcacatttgtgatactgacaggtatcaacccagaagcccatgaactgtgtttccatcctttgcatttctctgcgagtagttccacacaggtttgtaagtaagtaagaaagaaggcaaattgattcaaatgttacaaaaaaacccttcttggtggattagacaggttaaatatataaacaaacaaacaaaaattgctcaaaaaagaggagaaaagctcaagaggaaaagctaaggactggtaggaaaaagctttactctttcatgccattttatttctttttgatttttaaatcattcattcaatagataccaccgtgtgacctataattttgcaaatctgttacctctgacatcaagtgtaattagcttttggagagtgggctgacatcaagtgtaattagcttttggagagtgggttttgtccattattaataattaattaattaacatcaaacacggcttctcatgctatttctacctcactttggttttggggtgttcctgataattgtgcacacctgagttcacagcttcaccacttgtccattgcgttattttctttttcctttataattctttctttttccttcataattttcaaaagaaaacccaaagctctaaggtaacaaattaccaaattacatgaagatttggtttttgtcttgcatttttttcctttatgtgacgctggaccttttctttacccaaggatttttaaaactcagatttaaaacaaggggttactttacatcctactaagaagtttaagtaagtaagtttcattctaaaatcagaggtaaatagagtgcataaataattttgttttaatctttttgtttttcttttagacacattagctctggagtgagtctgtcataatatttgaacaaaaattgagagctttattgctgcattttaagcataattaatttggacattatttcgtgttgtgttctttataaccaccaagtattaaactgtaaatcataatgtaactgaagcataaacatcacatggcatgttttgtcattgttttcaggtactgagttcttacttgagtatcataatatattgtgttttaacaccaacactgtaacatttacgaattatttttttaaacttcagttttactgcattttcacaacatatcagacttcaccaaatatatgccttactattgtattatagtactgctttactgtgtatctcaataaagcacgcagttatgttacaaaaaa

SEQ ID NO: 446 - DNA, 13854 bp, Homo sapiens
  source 1..13854: mol_type = genomic DNA
ggcagtaatagaatgctttcaggaagatgacagaatcaggagaaagatgctgttttgcactatcttgatttgttacagcagccaacttattggcatgatggagtgacaggaaaaacagctggcatggaagatgaaagagaagatgttcaaaagaaaacattcacaaaatgggtaaatgcacaattttctaagtttgggaagcagcatattgagaacctcttcagtgacctacaggatgggaggcgcctcctagacctcctcgaaggcctgacagggcaaaaactgccaaaagaaaaaggatccacaagagttcatgccctgaacaatgtcaacaaggcactgcgggttttgcagaacaataatgttgatttagtgaatattggaagtactgacatcgtagatggaaatcataaactgactcttggtttgatttggaatataatcctccactggcaggtcaaaaatgtaatgaaaaatatcatggctggattgcaacaaaccaacagtgaaaagattctcctgagctgggtccgacaatcaactcgtaattatccacaggttaatgtaatcaacttcaccaccagctggtctgatggcctggctttgaatgctctcatccatagtcataggccagacctatttgactggaatagtgtggtttgccagcagtcagccacacaacgactggaacatgcattcaacatcgccagatatcaattaggcatagagaaactactcgatcctgaagatgttgataccacctatccagataagaagtccatcttaatgtacatcacatcactcttccaagttttgcctcaacaagtgagcattgaagccatccaggaagtggaaatgttgccaaggccacctaaagtgactaaagaagaacattttcagttacatcatcaaatgcactattctcaacagatcacggtcagtctagcacagggatatgagagaacttcttcccctaagcctcgattcaagagctatgcctacacacaggctgcttatgtcaccacctctgaccctacacggagcccatttccttcacagcatttggaagctcctgaagacaagtcatttggcagttcattgatggagagtgaagtaaacctggaccgttatcaaacagctttagaagaagtattatcgtggcttctttctgctgaggacacattgcaagcacaaggagagatttctaatgatgtggaagtggtgaaagaccagtttcatactcatgaggggtacatgatggatttgacagcccatcagggccgggttggtaatattctacaattgggaagtaagctgattggaacaggaaaattatcagaagatgaagaaactgaagtacaagagcagatgaatctcctaaattcaagatgggaatgcctcagggtagctagcatggaaaaacaaagcaatttacatagagttttaatggatctccagaatcagaaactgaaagagttgaatgactggctaacaaaaacagaagaaagaacaaggaaaatggaggaagagcctcttggacctgatcttgaagacctaaaacgccaagtacaacaacataaggtgcttcaagaagatctagaacaagaacaagtcagggtcaattctctcactcacatggtggtggtagttgatgaatctagtggagatcacgcaactgctgctttggaagaacaacttaaggtattgggagatcgatgggcaaacatctgtagatggacagaagaccgctgggttcttttacaagacatccttctcaaatggcaacgtcttactgaagaacagtgcctttttagtgcatggctttcagaaaaagaagatgcagtgaacaagattcacacaactggctttaaagatcaaaatgaaatgttatcaagtcttcaaaaactggccgttttaaaagcggatctagaaaagaaaaagcaatccatgggcaaactgtattcactcaaacaagatcttctttcaacactgaagaataagtcagtgacccagaagacggaagcatggctggataactttgcccggtgttgggataatttagtccaaaaacttgaaaagagtacagcacagatttcacaggctgtcaccaccactcagccatcactaacacagacaactgtaatggaaacagtaactacggtgaccacaagggaacagatcctggtaaagcatgctcaagaggaacttccaccaccacctccccaaaagaagaggcagattactgtggattctgaaattaggaaaaggttggatgttgatataactgaacttcacagctggattactcgctcagaagctgtgttgcagagtcctgaatttgcaatctttcggaaggaaggcaacttctcagacttaaaagaaaaagtcaatgccatagagcgagaaaaagctgagaagttcagaaaactgcaagatgccagcagatcagctcaggccctggtggaacagatggtgaatgagggtgttaatgcagatagcatcaaacaagcctcagaacaactgaacagccggtggatcgaattctgccagttgctaagtgagagacttaactggctggagtatcagaacaacatcatcgctttctataatcagctacaacaattggagcagatgacaactactgctgaaaactggttgaaaatccaacccaccaccccatcagagccaacagcaattaaaagtcagttaaaaatttgtaaggatgaagtcaaccggctatcagatcttcaacctcaaattgaacgattaaaaattcaaagcatagccctgaaagagaaaggacaaggacccatgttcctggatgcagactttgtggcctttacaaatcattttaagcaagtcttttctgatgtgcaggccagagagaaagagctacagacaatttttgacactttgccaccaatgcgctatcaggagaccatgagtgccatcaggacatgggtccagcagtcagaaaccaaactctccatacctcaacttagtgtcaccgactatgaaatcatggagcagagactcggggaattgcaggctttacaaagttctctgcaagagcaacaaagtggcctatactatctcagcaccactgtgaaagagatgtcgaagaaagcgccctctgaaattagccggaaatatcaatcagaatttgaagaaattgagggacgctggaagaagctctcctcccagctggttgagcattgtcaaaagctagaggagcaaatgaataaactccgaaaaattcagaatcacatacaaaccctgaagaaatggatggctgaagttgatgtttttctgaaggaggaatggcctgcccttggggattcagaaattctaaaaaagcagctgaaacagtgcagacttttagtcagtgatattcagacaattcagcccagtctaaacagtgtcaatgaaggtgggcagaagataaagaatgaagcagagccagagtttgcttcgagacttgagacagaactcaaagaacttaacactcagtgggatcacatgtgccaacaggtctatgccagaaaggaggccttgaagggaggtttggagaaaactgtaagcctccagaaagatctatcagagatgcacgaatggatgacacaagctgaagaagagtatcttgagagagattttgaatataaaactccagatgaattacagaaagcagttgaagagatgaagagagctaaagaagaggcccaacaaaaagaagcgaaagtgaaactccttactgagtctgtaaatagtgtcatagctcaagctccacctgtagcacaagaggccttaaaaaaggaacttgaaactctaaccaccaactaccagtggctctgcactaggctgaatgggaaatgcaagactttggaagaagtttgggcatgttggcatgagttattgtcatacttggagaaagcaaacaagtggctaaatgaagtagaatttaaacttaaaaccactgaaaacattcctggcggagctgaggaaatctctgaggtgctagattcacttgaaaatttgatgcgacattcagaggataacccaaatcagattcgcatattggcacagaccctaacagatggcggagtcatggatgagctaatcaatgaggaacttgagacatttaattctcgttggagggaactacatgaagaggctgtaaggaggcaaaagttgcttgaacagagcatccagtctgcccaggagactgaaaaatccttacacttaatccaggagtccctcacattcattgacaagcagttggcagcttatattgcagacaaggtggacgcagctcaaatgcctcaggaagcccagaaaatccaatctgatttgacaagtcatgagatcagtttagaagaaatgaagaaacataatcaggggaaggaggctgcccaaagagtcctgtctcagattgatgttgcacagaaaaaattacaagatgtctccatgaagtttcgattattccagaaaccagccaattttgagcagcgtctacaagaaagtaagatgattttagatgaagtgaagatgcacttgcctgcattggaaacaaagagtgtggaacaggaagtagtacagtcacagctaaatcattgtgtgaacttgtataaaagtctgagtgaagtgaagtctgaagtggaaatggtgataaagactggacgtcagattgtacagaaaaagcagacggaaaatcccaaagaacttgatgaaagagtaacagctttgaaattgcattataatgagctgggagcaaaggtaacagaaagaaagcaacagttggagaaatgcttgaaattgtcccgtaagatgcgaaaggaaatgaatgtcttgacagaatggctggcagctacagatatggaattgacaaagagatcagcagttgaaggaatgcctagtaatttggattctgaagttgcctggggaaaggctactcaaaaagagattgagaaacagaaggtgcacctgaagagtatcacagaggtaggagaggccttgaaaacagttttgggcaagaaggagacgttggtggaagataaactcagtcttctgaatagtaactggatagctgtcacctcccgagcagaagagtggttaaatcttttgttggaataccagaaacacatggaaacttttgaccagaatgtggaccacatcacaaagtggatcattcaggctgacacacttttggatgaatcagagaaaaagaaaccccagcaaaaagaagacgtgcttaagcgtttaaaggcagaactgaatgacatacgcccaaaggtggactctacacgtgaccaagcagcaaacttgatggcaaaccgcggtgaccactgcaggaaattagtagagccccaaatctcagagctcaaccatcgatttgcagccatttcacacagaattaagactggaaaggcctccattcctttgaaggaattggagcagtttaactcagatatacaaaaattgcttgaaccactggaggctgaaattcagcagggggtgaatctgaaagaggaagacttcaataaagatatgaatgaagacaatgagggtactgtaaaagaattgttgcaaagaggagacaacttacaacaaagaatcacagatgagagaaagcgagaggaaataaagataaaacagcagctgttacagacaaaacataatgctctcaaggatttgaggtctcaaagaagaaaaaaggctctagaaatttctcatcagtggtatcagtacaagaggcaggctgatgatctcctgaaatgcttggatgacattgaaaaaaaattagccagcctacctgagcccagagatgaaaggaaaataaaggaaattgatcgggaattgcagaagaagaaagaggagctgaatgcagtgcgtaggcaagctgagggcttgtctgaggatggggccgcaatggcagtggagccaactcagatccagctcagcaagcgctggcgggaaattgagagcaaatttgctcagtttcgaagactcaactttgcacaaattcacactgtccgtgaagaaacgatgatggtgatgactgaagacatgcctttggaaatttcttatgtgccttctacttatttgactgaaatcactcatgtctcacaagccctattagaagtggaacaacttctcaatgctcctgacctctgtgctaaggactttgaagatctctttaagcaagaggagtctctgaagaatataaaagatagtctacaacaaagctcaggtcggattgacattattcatagcaagaagacagcagcattgcaaagtgcaacgcctgtggaaagggtgaagctacaggaagctctctcccagcttgatttccaatgggaaaaagttaacaaaatgtacaaggaccgacaagggcgatttgacagatctgttgagaaatggcggcgttttcattatgatataaagatatttaatcagtggctaacagaagctgaacagtttctcagaaagacacaaattcctgagaattgggaacatgctaaatacaaatggtatcttaaggaactccaggatggcattgggcagcggcaaactgttgtcagaacattgaatgcaactggggaagaaataattcagcaatcctcaaaaacagatgccagtattctacaggaaaaattgggaagcctgaatctgcggtggcaggaggtctgcaaacagctgtcagacagaaaaaagaggctagaagaacaaaagaatatcttgtcagaatttcaaagagatttaaatgaatttgttttatggttggaggaagcagataacattgctagtatcccacttgaacctggaaaagagcagcaactaaaagaaaagcttgagcaagtcaagttactggtggaagagttgcccctgcgccagggaattctcaaacaattaaatgaaactggaggacccgtgcttgtaagtgctcccataagcccagaagagcaagataaacttgaaaataagctcaagcagacaaatctccagtggataaaggtttccagagctttacctgagaaacaaggagaaattgaagctcaaataaaagaccttgggcagcttgaaaaaaagcttgaagaccttgaagagcagttaaatcatctgctgctgtggttatctcctattaggaatcagttggaaatttataaccaaccaaaccaagaaggaccatttgacgttaaggaaactgaaatagcagttcaagctaaacaaccggatgtggaagagattttgtctaaagggcagcatttgtacaaggaaaaaccagccactcagccagtgaagaggaagttagaagatctgagctctgagtggaaggcggtaaaccgtttacttcaagagctgagggcaaagcagcctgacctagctcctggactgaccactattggagcctctcctactcagactgttactctggtgacacaacctgtggttactaaggaaactgccatctccaaactagaaatgccatcttccttgatgttggaggtacctgctctggcagatttcaaccgggcttggacagaacttaccgactggctttctctgcttgatcaagttataaaatcacagagggtgatggtgggtgaccttgaggatatcaacgagatgatcatcaagcagaaggcaacaatgcaggatttggaacagaggcgtccccagttggaagaactcattaccgctgcccaaaatttgaaaaacaagaccagcaatcaagaggctagaacaatcattacggatcgaattgaaagaattcagaatcagtgggatgaagtacaagaacaccttcagaaccggaggcaacagttgaatgaaatgttaaaggattcaacacaatggctggaagctaaggaagaagctgagcaggtcttaggacaggccagagccaagcttgagtcatggaaggagggtccctatacagtagatgcaatccaaaagaaaatcacagaaaccaagcagttggccaaagacctccgccagtggcagacaaatgtagatgtggcaaatgacttggccctgaaacttctccgggattattctgcagatgataccagaaaagtccacatgataacagagaatatcaatgcctcttggagaagcattcataaaagggtgagtgagcgagaggctgctttggaagaaactcatagattactgcaacagttccccctggacctggaaaagtttcttgcctggcttacagaagctgaaacaactgccaatgtcctacaggatgctacccgtaaggaaaggctcctagaagactccaagggagtaaaagagctgatgaaacaatggcaagacctccaaggtgaaattgaagctcacacagatgtttatcacaacctggatgaaaacagccaaaaaatcctgagatccctggaaggttccgatgatgcagtcctgttacaaagacgtttggataacatgaacttcaagtggagtgaacttcggaaaaagtctctcaacattaggtcccatttggaagccagttctgaccagtggaagcgtctgcacctttctctgcaggaacttctggtgtggctacagctgaaagatgatgaattaagccggcaggcacctattggaggcgactttccagcagttcagaagcagaacgatgtacatagggccttcaagagggaattgaaaactaaagaacctgtaatcatgagtactcttgagactgtacgaatatttctgacagagcagcctttggaaggactagagaaactctaccaggagcccagagagctgcctcctgaggagagagcccagaatgtcactcggcttctacgaaagcaggctgaggaggtcaatactgagtgggaaaaattgaacctgcactccgctgactggcagagaaaaatagatgagacccttgaaagactccgggaacttcaagaggccacggatgagctggacctcaagctgcgccaagctgaggtgatcaagggatcctggcagcccgtgggcgatctcctcattgactctctccaagatcacctcgagaaagtcaaggcacttcgaggagaaattgcgcctctgaaagagaacgtgagccacgtcaatgaccttgctcgccagcttaccactttgggcattcagctctcaccgtataacctcagcactctggaagacctgaacaccagatggaagcttctgcaggtggccgtcgaggaccgagtcaggcagctgcatgaagcccacagggactttggtccagcatctcagcactttctttccacgtctgtccagggtccctgggagagagccatctcgccaaacaaagtgccctactatatcaaccacgagactcaaacaacttgctgggaccatcccaaaatgacagagctctaccagtctttagctgacctgaataatgtcagattctcagcttataggactgccatgaaactccgaagactgcagaaggccctttgcttggatctcttgagcctgtcagctgcatgtgatgccttggaccagcacaacctcaagcaaaatgaccagcccatggatatcctgcagattattaattgtttgaccactatttatgaccgcctggagcaagagcacaacaatttggtcaacgtccctctctgcgtggatatgtgtctgaactggctgctgaatgtttatgatacgggacgaacagggaggatccgtgtcctgtcttttaaaactggcatcatttccctgtgtaaagcacatttggaagacaagtacagataccttttcaagcaagtggcaagttcaacaggattttgtgaccagcgcaggctgggcctccttctgcatgattctatccaaattccaagacagttgggtgaagttgcatcctttgggggcagtaacattgagccaagtgtccggagctgcttccaatttgctaataataagccagagatcgaagcggccctcttcctagactggatgagactggaaccccagtccatggtgtggctgcccgtcctgcacagagtggctgctgcagaaactgccaagcatcaggccaaatgtaacatctgcaaagagtgtccaatcattggattcaggtacaggagtctaaagcactttaattatgacatctgccaaagctgctttttttctggtcgagttgcaaaaggccataaaatgcactatcccatggtggaatattgcactccgactacatcaggagaagatgttcgagactttgccaaggtactaaaaaacaaatttcgaaccaaaaggtattttgcgaagcatccccgaatgggctacctgccagtgcagactgtcttagagggggacaacatggaaactcccgttactctgatcaacttctggccagtagattctgcgcctgcctcgtcccctcagctttcacacgatgatactcattcacgcattgaacattatgctagcaggctagcagaaatggaaaacagcaatggatcttatctaaatgatagcatctctcctaatgagagcatagatgatgaacatttgttaatccagcattactgccaaagtttgaaccaggactcccccctgagccagcctcgtagtcctgcccagatcttgatttccttagagagtgaggaaagaggggagctagagagaatcctagcagatcttgaggaagaaaacaggaatctgcaagcagaatatgaccgtctaaagcagcagcacgaacataaaggcctgtccccactgccgtcccctcctgaaatgatgcccacctctccccagagtccccgggatgctgagctcattgctgaggccaagctactgcgtcaacacaaaggccgcctggaagccaggatgcaaatcctggaagaccacaataaacagctggagtcacagttacacaggctaaggcagctgctggagcaaccccaggcagaggccaaagtgaatggcacaacggtgtcctctccttctacctctctacagaggtccgacagcagtcagcctatgctgctccgagtggttggcagtcaaacttcggactccatgggtgaggaagatcttctcagtcctccccaggacacaagcacagggttagaggaggtgatggagcaactcaacaactccttccctagttcaagaggaagaaatacccctggaaagccaatgagagaggacacaatgtaggaagtcttttccacatggcagatgatttgggcagagcgatggagtccttagtatcagtcatgacagatgaagaaggagcagaataaatgttttacaactcctgattcccgcatggtttttataatattcatacaacaaagaggattagacagtaagagtttacaagaaataaatctatatttttgtgaagggtagtggtattatactgtagatttcagtagtttctaagtctgttattgttttgttaacaatggcaggttttacacgtctatgcaattgtacaaaaaagttataagaaaactacatgtaaaatcttgatagctaaataacttgccatttctttatatggaacgcattttgggttgtttaaaaatttataacagttataaagaaagattgtaaactaaagtgtgctttataaaaaaaagttgtttataaaaacccctaaaaacaaaacaaacacacacacacacacatacacacacacacacaaaactttgaggcagcgcattgttttgcatccttttggcgtgatatccatatgaaattcatggctttttctttttttgcatattaaagataagacttcctctaccaccacaccaaatgactactacacactgctcatttgagaactgtcagctgagtggggcaggcttgagttttcatttcatatatctatatgtctataagtatataaatactatagttatatagataaagagatacgaatttctatagactgactttttccattttttaaatgttcatgtcacatcctaatagaaagaaattacttctagtcagtcatccaggcttacctgcttggtctagaatggatttttcccggagccggaagccaggaggaaactacaccacactaaaacattgtctacagctccagatgtttctcattttaaacaactttccactgacaacgaaagtaaagtaaagtattggatttttttaaagggaacatgtgaatgaatacacaggacttattatatcagagtgagtaatcggttggttggttgattgattgattgattgatacattcagcttcctgctgctagcaatgccacgatttagatttaatgatgcttcagtggaaatcaatcagaaggtattctgaccttgtgaacatcagaaggtattttttaactcccaagcagtagcaggacgatgatagggctggagggctatggattcccagcccatccctgtgaaggagtaggccactctttaagtgaaggattggatgattgttcataatacataaagttctctgtaattacaactaaattattatgccctcttctcacagtcaaaaggaactgggtggtttggtttttgttgcttttttagatttattgtcccatgtgggatgagtttttaaatgccacaagacataatttaaaataaataaactttgggaaaaggtgtaaaacagtagccccatcacatttgtgatactgacaggtatcaacccagaagcccatgaactgtgtttccatcctttgcatttctctgcgagtagttccacacaggtttgtaagtaagtaagaaagaaggcaaattgattcaaatgttacaaaaaaacccttcttggtggattagacaggttaaatatataaacaaacaaacaaaaattgctcaaaaaagaggagaaaagctcaagaggaaaagctaaggactggtaggaaaaagctttactctttcatgccattttatttctttttgatttttaaatcattcattcaatagataccaccgtgtgacctataattttgcaaatctgttacctctgacatcaagtgtaattagcttttggagagtgggctgacatcaagtgtaattagcttttggagagtgggttttgtccattattaataattaattaattaacatcaaacacggcttctcatgctatttctacctcactttggttttggggtgttcctgataattgtgcacacctgagttcacagcttcaccacttgtccattgcgttattttctttttcctttataattctttctttttccttcataattttcaaaagaaaacccaaagctctaaggtaacaaattaccaaattacatgaagatttggtttttgtcttgcatttttttcctttatgtgacgctggaccttttctttacccaaggatttttaaaactcagatttaaaacaaggggttactttacatcctactaagaagtttaagtaagtaagtttcattctaaaatcagaggtaaatagagtgcataaataattttgttttaatctttttgtttttcttttagacacattagctctggagtgagtctgtcataatatttgaacaaaaattgagagctttattgctgcattttaagcataattaatttggacattatttcgtgttgtgttctttataaccaccaagtattaaactgtaaatcataatgtaactgaagcataaacatcacatggcatgttttgtcattgttttcaggtactgagttcttacttgagtatcataatatattgtgttttaacaccaacactgtaacatttacgaattatttttttaaacttcagttttactgcattttcacaacatatcagacttcaccaaatatatgccttactattgtattatagtactgctttactgtgtatctcaataaagcacgcagttatgttacaaaaaa

SEQ ID NO: 447 - DNA, 13837 bp, Homo sapiens
  source 1..13837: mol_type = genomic DNA
atcagttactgtgttgactcactcagtgttgggatcactcactttccccctacaggactcagatctgggaggcaattaccttcggagaaaaacgaataggaaaaactgaagtgttactttttttaaagctgctgaagtttgttggtttctcattgtttttaagcctactggagcaataaagtttgaagaacttttaccaggttttttttatcgctgccttgatatacacttttcaaaatgctttggtgggaagaagtagaggactgttatgaaagagaagatgttcaaaagaaaacattcacaaaatgggtaaatgcacaattttctaagtttgggaagcagcatattgagaacctcttcagtgacctacaggatgggaggcgcctcctagacctcctcgaaggcctgacagggcaaaaactgccaaaagaaaaaggatccacaagagttcatgccctgaacaatgtcaacaaggcactgcgggttttgcagaacaataatgttgatttagtgaatattggaagtactgacatcgtagatggaaatcataaactgactcttggtttgatttggaatataatcctccactggcaggtcaaaaatgtaatgaaaaatatcatggctggattgcaacaaaccaacagtgaaaagattctcctgagctgggtccgacaatcaactcgtaattatccacaggttaatgtaatcaacttcaccaccagctggtctgatggcctggctttgaatgctctcatccatagtcataggccagacctatttgactggaatagtgtggtttgccagcagtcagccacacaacgactggaacatgcattcaacatcgccagatatcaattaggcatagagaaactactcgatcctgaagatgttgataccacctatccagataagaagtccatcttaatgtacatcacatcactcttccaagttttgcctcaacaagtgagcattgaagccatccaggaagtggaaatgttgccaaggccacctaaagtgactaaagaagaacattttcagttacatcatcaaatgcactattctcaacagatcacggtcagtctagcacagggatatgagagaacttcttcccctaagcctcgattcaagagctatgcctacacacaggctgcttatgtcaccacctctgaccctacacggagcccatttccttcacagcatttggaagctcctgaagacaagtcatttggcagttcattgatggagagtgaagtaaacctggaccgttatcaaacagctttagaagaagtattatcgtggcttctttctgctgaggacacattgcaagcacaaggagagatttctaatgatgtggaagtggtgaaagaccagtttcatactcatgaggggtacatgatggatttgacagcccatcagggccgggttggtaatattctacaattgggaagtaagctgattggaacaggaaaattatcagaagatgaagaaactgaagtacaagagcagatgaatctcctaaattcaagatgggaatgcctcagggtagctagcatggaaaaacaaagcaatttacatagagttttaatggatctccagaatcagaaactgaaagagttgaatgactggctaacaaaaacagaagaaagaacaaggaaaatggaggaagagcctcttggacctgatcttgaagacctaaaacgccaagtacaacaacataaggtgcttcaagaagatctagaacaagaacaagtcagggtcaattctctcactcacatggtggtggtagttgatgaatctagtggagatcacgcaactgctgctttggaagaacaacttaaggtattgggagatcgatgggcaaacatctgtagatggacagaagaccgctgggttcttttacaagacatccttctcaaatggcaacgtcttactgaagaacagtgcctttttagtgcatggctttcagaaaaagaagatgcagtgaacaagattcacacaactggctttaaagatcaaaatgaaatgttatcaagtcttcaaaaactggccgttttaaaagcggatctagaaaagaaaaagcaatccatgggcaaactgtattcactcaaacaagatcttctttcaacactgaagaataagtcagtgacccagaagacggaagcatggctggataactttgcccggtgttgggataatttagtccaaaaacttgaaaagagtacagcacagatttcacaggctgtcaccaccactcagccatcactaacacagacaactgtaatggaaacagtaactacggtgaccacaagggaacagatcctggtaaagcatgctcaagaggaacttccaccaccacctccccaaaagaagaggcagattactgtggattctgaaattaggaaaaggttggatgttgatataactgaacttcacagctggattactcgctcagaagctgtgttgcagagtcctgaatttgcaatctttcggaaggaaggcaacttctcagacttaaaagaaaaagtcaatgccatagagcgagaaaaagctgagaagttcagaaaactgcaagatgccagcagatcagctcaggccctggtggaacagatggtgaatgagggtgttaatgcagatagcatcaaacaagcctcagaacaactgaacagccggtggatcgaattctgccagttgctaagtgagagacttaactggctggagtatcagaacaacatcatcgctttctataatcagctacaacaattggagcagatgacaactactgctgaaaactggttgaaaatccaacccaccaccccatcagagccaacagcaattaaaagtcagttaaaaatttgtaaggatgaagtcaaccggctatcagatcttcaacctcaaattgaacgattaaaaattcaaagcatagccctgaaagagaaaggacaaggacccatgttcctggatgcagactttgtggcctttacaaatcattttaagcaagtcttttctgatgtgcaggccagagagaaagagctacagacaatttttgacactttgccaccaatgcgctatcaggagaccatgagtgccatcaggacatgggtccagcagtcagaaaccaaactctccatacctcaacttagtgtcaccgactatgaaatcatggagcagagactcggggaattgcaggctttacaaagttctctgcaagagcaacaaagtggcctatactatctcagcaccactgtgaaagagatgtcgaagaaagcgccctctgaaattagccggaaatatcaatcagaatttgaagaaattgagggacgctggaagaagctctcctcccagctggttgagcattgtcaaaagctagaggagcaaatgaataaactccgaaaaattcagaatcacatacaaaccctgaagaaatggatggctgaagttgatgtttttctgaaggaggaatggcctgcccttggggattcagaaattctaaaaaagcagctgaaacagtgcagacttttagtcagtgatattcagacaattcagcccagtctaaacagtgtcaatgaaggtgggcagaagataaagaatgaagcagagccagagtttgcttcgagacttgagacagaactcaaagaacttaacactcagtgggatcacatgtgccaacaggtctatgccagaaaggaggccttgaagggaggtttggagaaaactgtaagcctccagaaagatctatcagagatgcacgaatggatgacacaagctgaagaagagtatcttgagagagattttgaatataaaactccagatgaattacagaaagcagttgaagagatgaagagagctaaagaagaggcccaacaaaaagaagcgaaagtgaaactccttactgagtctgtaaatagtgtcatagctcaagctccacctgtagcacaagaggccttaaaaaaggaacttgaaactctaaccaccaactaccagtggctctgcactaggctgaatgggaaatgcaagactttggaagaagtttgggcatgttggcatgagttattgtcatacttggagaaagcaaacaagtggctaaatgaagtagaatttaaacttaaaaccactgaaaacattcctggcggagctgaggaaatctctgaggtgctagattcacttgaaaatttgatgcgacattcagaggataacccaaatcagattcgcatattggcacagaccctaacagatggcggagtcatggatgagctaatcaatgaggaacttgagacatttaattctcgttggagggaactacatgaagaggctgtaaggaggcaaaagttgcttgaacagagcatccagtctgcccaggagactgaaaaatccttacacttaatccaggagtccctcacattcattgacaagcagttggcagcttatattgcagacaaggtggacgcagctcaaatgcctcaggaagcccagaaaatccaatctgatttgacaagtcatgagatcagtttagaagaaatgaagaaacataatcaggggaaggaggctgcccaaagagtcctgtctcagattgatgttgcacagaaaaaattacaagatgtctccatgaagtttcgattattccagaaaccagccaattttgagcagcgtctacaagaaagtaagatgattttagatgaagtgaagatgcacttgcctgcattggaaacaaagagtgtggaacaggaagtagtacagtcacagctaaatcattgtgtgaacttgtataaaagtctgagtgaagtgaagtctgaagtggaaatggtgataaagactggacgtcagattgtacagaaaaagcagacggaaaatcccaaagaacttgatgaaagagtaacagctttgaaattgcattataatgagctgggagcaaaggtaacagaaagaaagcaacagttggagaaatgcttgaaattgtcccgtaagatgcgaaaggaaatgaatgtcttgacagaatggctggcagctacagatatggaattgacaaagagatcagcagttgaaggaatgcctagtaatttggattctgaagttgcctggggaaaggctactcaaaaagagattgagaaacagaaggtgcacctgaagagtatcacagaggtaggagaggccttgaaaacagttttgggcaagaaggagacgttggtggaagataaactcagtcttctgaatagtaactggatagctgtcacctcccgagcagaagagtggttaaatcttttgttggaataccagaaacacatggaaacttttgaccagaatgtggaccacatcacaaagtggatcattcaggctgacacacttttggatgaatcagagaaaaagaaaccccagcaaaaagaagacgtgcttaagcgtttaaaggcagaactgaatgacatacgcccaaaggtggactctacacgtgaccaagcagcaaacttgatggcaaaccgcggtgaccactgcaggaaattagtagagccccaaatctcagagctcaaccatcgatttgcagccatttcacacagaattaagactggaaagaatgaagacaatgagggtactgtaaaagaattgttgcaaagaggagacaacttacaacaaagaatcacagatgagagaaagcgagaggaaataaagataaaacagcagctgttacagacaaaacataatgctctcaaggatttgaggtctcaaagaagaaaaaaggctctagaaatttctcatcagtggtatcagtacaagaggcaggctgatgatctcctgaaatgcttggatgacattgaaaaaaaattagccagcctacctgagcccagagatgaaaggaaaataaaggaaattgatcgggaattgcagaagaagaaagaggagctgaatgcagtgcgtaggcaagctgagggcttgtctgaggatggggccgcaatggcagtggagccaactcagatccagctcagcaagcgctggcgggaaattgagagcaaatttgctcagtttcgaagactcaactttgcacaaattcacactgtccgtgaagaaacgatgatggtgatgactgaagacatgcctttggaaatttcttatgtgccttctacttatttgactgaaatcactcatgtctcacaagccctattagaagtggaacaacttctcaatgctcctgacctctgtgctaaggactttgaagatctctttaagcaagaggagtctctgaagaatataaaagatagtctacaacaaagctcaggtcggattgacattattcatagcaagaagacagcagcattgcaaagtgcaacgcctgtggaaagggtgaagctacaggaagctctctcccagcttgatttccaatgggaaaaagttaacaaaatgtacaaggaccgacaagggcgatttgacagatctgttgagaaatggcggcgttttcattatgatataaagatatttaatcagtggctaacagaagctgaacagtttctcagaaagacacaaattcctgagaattgggaacatgctaaatacaaatggtatcttaaggaactccaggatggcattgggcagcggcaaactgttgtcagaacattgaatgcaactggggaagaaataattcagcaatcctcaaaaacagatgccagtattctacaggaaaaattgggaagcctgaatctgcggtggcaggaggtctgcaaacagctgtcagacagaaaaaagaggctagaagaacaaaagaatatcttgtcagaatttcaaagagatttaaatgaatttgttttatggttggaggaagcagataacattgctagtatcccacttgaacctggaaaagagcagcaactaaaagaaaagcttgagcaagtcaagttactggtggaagagttgcccctgcgccagggaattctcaaacaattaaatgaaactggaggacccgtgcttgtaagtgctcccataagcccagaagagcaagataaacttgaaaataagctcaagcagacaaatctccagtggataaaggtttccagagctttacctgagaaacaaggagaaattgaagctcaaataaaagaccttgggcagcttgaaaaaaagcttgaagaccttgaagagcagttaaatcatctgctgctgtggttatctcctattaggaatcagttggaaatttataaccaaccaaaccaagaaggaccatttgacgttaaggaaactgaaatagcagttcaagctaaacaaccggatgtggaagagattttgtctaaagggcagcatttgtacaaggaaaaaccagccactcagccagtgaagaggaagttagaagatctgagctctgagtggaaggcggtaaaccgtttacttcaagagctgagggcaaagcagcctgacctagctcctggactgaccactattggagcctctcctactcagactgttactctggtgacacaacctgtggttactaaggaaactgccatctccaaactagaaatgccatcttccttgatgttggaggtacctgctctggcagatttcaaccgggcttggacagaacttaccgactggctttctctgcttgatcaagttataaaatcacagagggtgatggtgggtgaccttgaggatatcaacgagatgatcatcaagcagaaggcaacaatgcaggatttggaacagaggcgtccccagttggaagaactcattaccgctgcccaaaatttgaaaaacaagaccagcaatcaagaggctagaacaatcattacggatcgaattgaaagaattcagaatcagtgggatgaagtacaagaacaccttcagaaccggaggcaacagttgaatgaaatgttaaaggattcaacacaatggctggaagctaaggaagaagctgagcaggtcttaggacaggccagagccaagcttgagtcatggaaggagggtccctatacagtagatgcaatccaaaagaaaatcacagaaaccaagcagttggccaaagacctccgccagtggcagacaaatgtagatgtggcaaatgacttggccctgaaacttctccgggattattctgcagatgataccagaaaagtccacatgataacagagaatatcaatgcctcttggagaagcattcataaaagggtgagtgagcgagaggctgctttggaagaaactcatagattactgcaacagttccccctggacctggaaaagtttcttgcctggcttacagaagctgaaacaactgccaatgtcctacaggatgctacccgtaaggaaaggctcctagaagactccaagggagtaaaagagctgatgaaacaatggcaagacctccaaggtgaaattgaagctcacacagatgtttatcacaacctggatgaaaacagccaaaaaatcctgagatccctggaaggttccgatgatgcagtcctgttacaaagacgtttggataacatgaacttcaagtggagtgaacttcggaaaaagtctctcaacattaggtcccatttggaagccagttctgaccagtggaagcgtctgcacctttctctgcaggaacttctggtgtggctacagctgaaagatgatgaattaagccggcaggcacctattggaggcgactttccagcagttcagaagcagaacgatgtacatagggccttcaagagggaattgaaaactaaagaacctgtaatcatgagtactcttgagactgtacgaatatttctgacagagcagcctttggaaggactagagaaactctaccaggagcccagagagctgcctcctgaggagagagcccagaatgtcactcggcttctacgaaagcaggctgaggaggtcaatactgagtgggaaaaattgaacctgcactccgctgactggcagagaaaaatagatgagacccttgaaagactccgggaacttcaagaggccacggatgagctggacctcaagctgcgccaagctgaggtgatcaagggatcctggcagcccgtgggcgatctcctcattgactctctccaagatcacctcgagaaagtcaaggcacttcgaggagaaattgcgcctctgaaagagaacgtgagccacgtcaatgaccttgctcgccagcttaccactttgggcattcagctctcaccgtataacctcagcactctggaagacctgaacaccagatggaagcttctgcaggtggccgtcgaggaccgagtcaggcagctgcatgaagcccacagggactttggtccagcatctcagcactttctttccacgtctgtccagggtccctgggagagagccatctcgccaaacaaagtgccctactatatcaaccacgagactcaaacaacttgctgggaccatcccaaaatgacagagctctaccagtctttagctgacctgaataatgtcagattctcagcttataggactgccatgaaactccgaagactgcagaaggccctttgcttggatctcttgagcctgtcagctgcatgtgatgccttggaccagcacaacctcaagcaaaatgaccagcccatggatatcctgcagattattaattgtttgaccactatttatgaccgcctggagcaagagcacaacaatttggtcaacgtccctctctgcgtggatatgtgtctgaactggctgctgaatgtttatgatacgggacgaacagggaggatccgtgtcctgtcttttaaaactggcatcatttccctgtgtaaagcacatttggaagacaagtacagataccttttcaagcaagtggcaagttcaacaggattttgtgaccagcgcaggctgggcctccttctgcatgattctatccaaattccaagacagttgggtgaagttgcatcctttgggggcagtaacattgagccaagtgtccggagctgcttccaatttgctaataataagccagagatcgaagcggccctcttcctagactggatgagactggaaccccagtccatggtgtggctgcccgtcctgcacagagtggctgctgcagaaactgccaagcatcaggccaaatgtaacatctgcaaagagtgtccaatcattggattcaggtacaggagtctaaagcactttaattatgacatctgccaaagctgctttttttctggtcgagttgcaaaaggccataaaatgcactatcccatggtggaatattgcactccgactacatcaggagaagatgttcgagactttgccaaggtactaaaaaacaaatttcgaaccaaaaggtattttgcgaagcatccccgaatgggctacctgccagtgcagactgtcttagagggggacaacatggaaactcccgttactctgatcaacttctggccagtagattctgcgcctgcctcgtcccctcagctttcacacgatgatactcattcacgcattgaacattatgctagcaggctagcagaaatggaaaacagcaatggatcttatctaaatgatagcatctctcctaatgagagcatagatgatgaacatttgttaatccagcattactgccaaagtttgaaccaggactcccccctgagccagcctcgtagtcctgcccagatcttgatttccttagagagtgaggaaagaggggagctagagagaatcctagcagatcttgaggaagaaaacaggaatctgcaagcagaatatgaccgtctaaagcagcagcacgaacataaaggcctgtccccactgccgtcccctcctgaaatgatgcccacctctccccagagtccccgggatgctgagctcattgctgaggccaagctactgcgtcaacacaaaggccgcctggaagccaggatgcaaatcctggaagaccacaataaacagctggagtcacagttacacaggctaaggcagctgctggagcaaccccaggcagaggccaaagtgaatggcacaacggtgtcctctccttctacctctctacagaggtccgacagcagtcagcctatgctgctccgagtggttggcagtcaaacttcggactccatgggtgaggaagatcttctcagtcctccccaggacacaagcacagggttagaggaggtgatggagcaactcaacaactccttccctagttcaagaggacacaatgtaggaagtcttttccacatggcagatgatttgggcagagcgatggagtccttagtatcagtcatgacagatgaagaaggagcagaataaatgttttacaactcctgattcccgcatggtttttataatattcatacaacaaagaggattagacagtaagagtttacaagaaataaatctatatttttgtgaagggtagtggtattatactgtagatttcagtagtttctaagtctgttattgttttgttaacaatggcaggttttacacgtctatgcaattgtacaaaaaagttataagaaaactacatgtaaaatcttgatagctaaataacttgccatttctttatatggaacgcattttgggttgtttaaaaatttataacagttataaagaaagattgtaaactaaagtgtgctttataaaaaaaagttgtttataaaaacccctaaaaacaaaacaaacacacacacacacacatacacacacacacacaaaactttgaggcagcgcattgttttgcatccttttggcgtgatatccatatgaaattcatggctttttctttttttgcatattaaagataagacttcctctaccaccacaccaaatgactactacacactgctcatttgagaactgtcagctgagtggggcaggcttgagttttcatttcatatatctatatgtctataagtatataaatactatagttatatagataaagagatacgaatttctatagactgactttttccattttttaaatgttcatgtcacatcctaatagaaagaaattacttctagtcagtcatccaggcttacctgcttggtctagaatggatttttcccggagccggaagccaggaggaaactacaccacactaaaacattgtctacagctccagatgtttctcattttaaacaactttccactgacaacgaaagtaaagtaaagtattggatttttttaaagggaacatgtgaatgaatacacaggacttattatatcagagtgagtaatcggttggttggttgattgattgattgattgatacattcagcttcctgctgctagcaatgccacgatttagatttaatgatgcttcagtggaaatcaatcagaaggtattctgaccttgtgaacatcagaaggtattttttaactcccaagcagtagcaggacgatgatagggctggagggctatggattcccagcccatccctgtgaaggagtaggccactctttaagtgaaggattggatgattgttcataatacataaagttctctgtaattacaactaaattattatgccctcttctcacagtcaaaaggaactgggtggtttggtttttgttgcttttttagatttattgtcccatgtgggatgagtttttaaatgccacaagacataatttaaaataaataaactttgggaaaaggtgtaaaacagtagccccatcacatttgtgatactgacaggtatcaacccagaagcccatgaactgtgtttccatcctttgcatttctctgcgagtagttccacacaggtttgtaagtaagtaagaaagaaggcaaattgattcaaatgttacaaaaaaacccttcttggtggattagacaggttaaatatataaacaaacaaacaaaaattgctcaaaaaagaggagaaaagctcaagaggaaaagctaaggactggtaggaaaaagctttactctttcatgccattttatttctttttgatttttaaatcattcattcaatagataccaccgtgtgacctataattttgcaaatctgttacctctgacatcaagtgtaattagcttttggagagtgggctgacatcaagtgtaattagcttttggagagtgggttttgtccattattaataattaattaattaacatcaaacacggcttctcatgctatttctacctcactttggttttggggtgttcctgataattgtgcacacctgagttcacagcttcaccacttgtccattgcgttattttctttttcctttataattctttctttttccttcataattttcaaaagaaaacccaaagctctaaggtaacaaattaccaaattacatgaagatttggtttttgtcttgcatttttttcctttatgtgacgctggaccttttctttacccaaggatttttaaaactcagatttaaaacaaggggttactttacatcctactaagaagtttaagtaagtaagtttcattctaaaatcagaggtaaatagagtgcataaataattttgttttaatctttttgtttttcttttagacacattagctctggagtgagtctgtcataatatttgaacaaaaattgagagctttattgctgcattttaagcataattaatttggacattatttcgtgttgtgttctttataaccaccaagtattaaactgtaaatcataatgtaactgaagcataaacatcacatggcatgttttgtcattgttttcaggtactgagttcttacttgagtatcataatatattgtgttttaacaccaacactgtaacatttacgaattatttttttaaacttcagttttactgcattttcacaacatatcagacttcaccaaatatatgccttactattgtattatagtactgctttactgtgtatctcaataaagcacgcagttatgttacaaaaaa

SEQ ID NO: 448 - DNA, 13822 bp, Homo sapiens
  source 1..13822: mol_type = genomic DNA
atcagttactgtgttgactcactcagtgttgggatcactcactttccccctacaggactcagatctgggaggcaattaccttcggagaaaaacgaataggaaaaactgaagtgttactttttttaaagctgctgaagtttgttggtttctcattgtttttaagcctactggagcaataaagtttgaagaacttttaccaggttttttttatcgctgccttgatatacacttttcaaaatgctttggtgggaagaagtagaggactgttatgaaagagaagatgttcaaaagaaaacattcacaaaatgggtaaatgcacaattttctaagtttgggaagcagcatattgagaacctcttcagtgacctacaggatgggaggcgcctcctagacctcctcgaaggcctgacagggcaaaaactgccaaaagaaaaaggatccacaagagttcatgccctgaacaatgtcaacaaggcactgcgggttttgcagaacaataatgttgatttagtgaatattggaagtactgacatcgtagatggaaatcataaactgactcttggtttgatttggaatataatcctccactggcaggtcaaaaatgtaatgaaaaatatcatggctggattgcaacaaaccaacagtgaaaagattctcctgagctgggtccgacaatcaactcgtaattatccacaggttaatgtaatcaacttcaccaccagctggtctgatggcctggctttgaatgctctcatccatagtcataggccagacctatttgactggaatagtgtggtttgccagcagtcagccacacaacgactggaacatgcattcaacatcgccagatatcaattaggcatagagaaactactcgatcctgaagatgttgataccacctatccagataagaagtccatcttaatgtacatcacatcactcttccaagttttgcctcaacaagtgagcattgaagccatccaggaagtggaaatgttgccaaggccacctaaagtgactaaagaagaacattttcagttacatcatcaaatgcactattctcaacagatcacggtcagtctagcacagggatatgagagaacttcttcccctaagcctcgattcaagagctatgcctacacacaggctgcttatgtcaccacctctgaccctacacggagcccatttccttcacagcatttggaagctcctgaagacaagtcatttggcagttcattgatggagagtgaagtaaacctggaccgttatcaaacagctttagaagaagtattatcgtggcttctttctgctgaggacacattgcaagcacaaggagagatttctaatgatgtggaagtggtgaaagaccagtttcatactcatgaggggtacatgatggatttgacagcccatcagggccgggttggtaatattctacaattgggaagtaagctgattggaacaggaaaattatcagaagatgaagaaactgaagtacaagagcagatgaatctcctaaattcaagatgggaatgcctcagggtagctagcatggaaaaacaaagcaatttacatagagttttaatggatctccagaatcagaaactgaaagagttgaatgactggctaacaaaaacagaagaaagaacaaggaaaatggaggaagagcctcttggacctgatcttgaagacctaaaacgccaagtacaacaacataaggtgcttcaagaagatctagaacaagaacaagtcagggtcaattctctcactcacatggtggtggtagttgatgaatctagtggagatcacgcaactgctgctttggaagaacaacttaaggtattgggagatcgatgggcaaacatctgtagatggacagaagaccgctgggttcttttacaagacatccttctcaaatggcaacgtcttactgaagaacagtgcctttttagtgcatggctttcagaaaaagaagatgcagtgaacaagattcacacaactggctttaaagatcaaaatgaaatgttatcaagtcttcaaaaactggccgttttaaaagcggatctagaaaagaaaaagcaatccatgggcaaactgtattcactcaaacaagatcttctttcaacactgaagaataagtcagtgacccagaagacggaagcatggctggataactttgcccggtgttgggataatttagtccaaaaacttgaaaagagtacagcacagatttcacaggctgtcaccaccactcagccatcactaacacagacaactgtaatggaaacagtaactacggtgaccacaagggaacagatcctggtaaagcatgctcaagaggaacttccaccaccacctccccaaaagaagaggcagattactgtggattctgaaattaggaaaaggttggatgttgatataactgaacttcacagctggattactcgctcagaagctgtgttgcagagtcctgaatttgcaatctttcggaaggaaggcaacttctcagacttaaaagaaaaagtcaatgccatagagcgagaaaaagctgagaagttcagaaaactgcaagatgccagcagatcagctcaggccctggtggaacagatggtgaatgagggtgttaatgcagatagcatcaaacaagcctcagaacaactgaacagccggtggatcgaattctgccagttgctaagtgagagacttaactggctggagtatcagaacaacatcatcgctttctataatcagctacaacaattggagcagatgacaactactgctgaaaactggttgaaaatccaacccaccaccccatcagagccaacagcaattaaaagtcagttaaaaatttgtaaggatgaagtcaaccggctatcagatcttcaacctcaaattgaacgattaaaaattcaaagcatagccctgaaagagaaaggacaaggacccatgttcctggatgcagactttgtggcctttacaaatcattttaagcaagtcttttctgatgtgcaggccagagagaaagagctacagacaatttttgacactttgccaccaatgcgctatcaggagaccatgagtgccatcaggacatgggtccagcagtcagaaaccaaactctccatacctcaacttagtgtcaccgactatgaaatcatggagcagagactcggggaattgcaggctttacaaagttctctgcaagagcaacaaagtggcctatactatctcagcaccactgtgaaagagatgtcgaagaaagcgccctctgaaattagccggaaatatcaatcagaatttgaagaaattgagggacgctggaagaagctctcctcccagctggttgagcattgtcaaaagctagaggagcaaatgaataaactccgaaaaattcagaatcacatacaaaccctgaagaaatggatggctgaagttgatgtttttctgaaggaggaatggcctgcccttggggattcagaaattctaaaaaagcagctgaaacagtgcagacttttagtcagtgatattcagacaattcagcccagtctaaacagtgtcaatgaaggtgggcagaagataaagaatgaagcagagccagagtttgcttcgagacttgagacagaactcaaagaacttaacactcagtgggatcacatgtgccaacaggtctatgccagaaaggaggccttgaagggaggtttggagaaaactgtaagcctccagaaagatctatcagagatgcacgaatggatgacacaagctgaagaagagtatcttgagagagattttgaatataaaactccagatgaattacagaaagcagttgaagagatgaagagagctaaagaagaggcccaacaaaaagaagcgaaagtgaaactccttactgagtctgtaaatagtgtcatagctcaagctccacctgtagcacaagaggccttaaaaaaggaacttgaaactctaaccaccaactaccagtggctctgcactaggctgaatgggaaatgcaagactttggaagaagtttgggcatgttggcatgagttattgtcatacttggagaaagcaaacaagtggctaaatgaagtagaatttaaacttaaaaccactgaaaacattcctggcggagctgaggaaatctctgaggtgctagattcacttgaaaatttgatgcgacattcagaggataacccaaatcagattcgcatattggcacagaccctaacagatggcggagtcatggatgagctaatcaatgaggaacttgagacatttaattctcgttggagggaactacatgaagaggctgtaaggaggcaaaagttgcttgaacagagcatccagtctgcccaggagactgaaaaatccttacacttaatccaggagtccctcacattcattgacaagcagttggcagcttatattgcagacaaggtggacgcagctcaaatgcctcaggaagcccagaaaatccaatctgatttgacaagtcatgagatcagtttagaagaaatgaagaaacataatcaggggaaggaggctgcccaaagagtcctgtctcagattgatgttgcacagaaaaaattacaagatgtctccatgaagtttcgattattccagaaaccagccaattttgagcagcgtctacaagaaagtaagatgattttagatgaagtgaagatgcacttgcctgcattggaaacaaagagtgtggaacaggaagtagtacagtcacagctaaatcattgtgtgaacttgtataaaagtctgagtgaagtgaagtctgaagtggaaatggtgataaagactggacgtcagattgtacagaaaaagcagacggaaaatcccaaagaacttgatgaaagagtaacagctttgaaattgcattataatgagctgggagcaaaggtaacagaaagaaagcaacagttggagaaatgcttgaaattgtcccgtaagatgcgaaaggaaatgaatgtcttgacagaatggctggcagctacagatatggaattgacaaagagatcagcagttgaaggaatgcctagtaatttggattctgaagttgcctggggaaaggctactcaaaaagagattgagaaacagaaggtgcacctgaagagtatcacagaggtaggagaggccttgaaaacagttttgggcaagaaggagacgttggtggaagataaactcagtcttctgaatagtaactggatagctgtcacctcccgagcagaagagtggttaaatcttttgttggaataccagaaacacatggaaacttttgaccagaatgtggaccacatcacaaagtggatcattcaggctgacacacttttggatgaatcagagaaaaagaaaccccagcaaaaagaagacgtgcttaagcgtttaaaggcagaactgaatgacatacgcccaaaggtggactctacacgtgaccaagcagcaaacttgatggcaaaccgcggtgaccactgcaggaaattagtagagccccaaatctcagagctcaaccatcgatttgcagccatttcacacagaattaagactggaaaggcctccattcctttgaaggaattggagcagtttaactcagatatacaaaaattgcttgaaccactggaggctgaaattcagcagggggtgaatctgaaagaggaagacttcaataaagatatggatttgaggtctcaaagaagaaaaaaggctctagaaatttctcatcagtggtatcagtacaagaggcaggctgatgatctcctgaaatgcttggatgacattgaaaaaaaattagccagcctacctgagcccagagatgaaaggaaaataaaggaaattgatcgggaattgcagaagaagaaagaggagctgaatgcagtgcgtaggcaagctgagggcttgtctgaggatggggccgcaatggcagtggagccaactcagatccagctcagcaagcgctggcgggaaattgagagcaaatttgctcagtttcgaagactcaactttgcacaaattcacactgtccgtgaagaaacgatgatggtgatgactgaagacatgcctttggaaatttcttatgtgccttctacttatttgactgaaatcactcatgtctcacaagccctattagaagtggaacaacttctcaatgctcctgacctctgtgctaaggactttgaagatctctttaagcaagaggagtctctgaagaatataaaagatagtctacaacaaagctcaggtcggattgacattattcatagcaagaagacagcagcattgcaaagtgcaacgcctgtggaaagggtgaagctacaggaagctctctcccagcttgatttccaatgggaaaaagttaacaaaatgtacaaggaccgacaagggcgatttgacagatctgttgagaaatggcggcgttttcattatgatataaagatatttaatcagtggctaacagaagctgaacagtttctcagaaagacacaaattcctgagaattgggaacatgctaaatacaaatggtatcttaaggaactccaggatggcattgggcagcggcaaactgttgtcagaacattgaatgcaactggggaagaaataattcagcaatcctcaaaaacagatgccagtattctacaggaaaaattgggaagcctgaatctgcggtggcaggaggtctgcaaacagctgtcagacagaaaaaagaggctagaagaacaaaagaatatcttgtcagaatttcaaagagatttaaatgaatttgttttatggttggaggaagcagataacattgctagtatcccacttgaacctggaaaagagcagcaactaaaagaaaagcttgagcaagtcaagttactggtggaagagttgcccctgcgccagggaattctcaaacaattaaatgaaactggaggacccgtgcttgtaagtgctcccataagcccagaagagcaagataaacttgaaaataagctcaagcagacaaatctccagtggataaaggtttccagagctttacctgagaaacaaggagaaattgaagctcaaataaaagaccttgggcagcttgaaaaaaagcttgaagaccttgaagagcagttaaatcatctgctgctgtggttatctcctattaggaatcagttggaaatttataaccaaccaaaccaagaaggaccatttgacgttaaggaaactgaaatagcagttcaagctaaacaaccggatgtggaagagattttgtctaaagggcagcatttgtacaaggaaaaaccagccactcagccagtgaagaggaagttagaagatctgagctctgagtggaaggcggtaaaccgtttacttcaagagctgagggcaaagcagcctgacctagctcctggactgaccactattggagcctctcctactcagactgttactctggtgacacaacctgtggttactaaggaaactgccatctccaaactagaaatgccatcttccttgatgttggaggtacctgctctggcagatttcaaccgggcttggacagaacttaccgactggctttctctgcttgatcaagttataaaatcacagagggtgatggtgggtgaccttgaggatatcaacgagatgatcatcaagcagaaggcaacaatgcaggatttggaacagaggcgtccccagttggaagaactcattaccgctgcccaaaatttgaaaaacaagaccagcaatcaagaggctagaacaatcattacggatcgaattgaaagaattcagaatcagtgggatgaagtacaagaacaccttcagaaccggaggcaacagttgaatgaaatgttaaaggattcaacacaatggctggaagctaaggaagaagctgagcaggtcttaggacaggccagagccaagcttgagtcatggaaggagggtccctatacagtagatgcaatccaaaagaaaatcacagaaaccaagcagttggccaaagacctccgccagtggcagacaaatgtagatgtggcaaatgacttggccctgaaacttctccgggattattctgcagatgataccagaaaagtccacatgataacagagaatatcaatgcctcttggagaagcattcataaaagggtgagtgagcgagaggctgctttggaagaaactcatagattactgcaacagttccccctggacctggaaaagtttcttgcctggcttacagaagctgaaacaactgccaatgtcctacaggatgctacccgtaaggaaaggctcctagaagactccaagggagtaaaagagctgatgaaacaatggcaagacctccaaggtgaaattgaagctcacacagatgtttatcacaacctggatgaaaacagccaaaaaatcctgagatccctggaaggttccgatgatgcagtcctgttacaaagacgtttggataacatgaacttcaagtggagtgaacttcggaaaaagtctctcaacattaggtcccatttggaagccagttctgaccagtggaagcgtctgcacctttctctgcaggaacttctggtgtggctacagctgaaagatgatgaattaagccggcaggcacctattggaggcgactttccagcagttcagaagcagaacgatgtacatagggccttcaagagggaattgaaaactaaagaacctgtaatcatgagtactcttgagactgtacgaatatttctgacagagcagcctttggaaggactagagaaactctaccaggagcccagagagctgcctcctgaggagagagcccagaatgtcactcggcttctacgaaagcaggctgaggaggtcaatactgagtgggaaaaattgaacctgcactccgctgactggcagagaaaaatagatgagacccttgaaagactccgggaacttcaagaggccacggatgagctggacctcaagctgcgccaagctgaggtgatcaagggatcctggcagcccgtgggcgatctcctcattgactctctccaagatcacctcgagaaagtcaaggcacttcgaggagaaattgcgcctctgaaagagaacgtgagccacgtcaatgaccttgctcgccagcttaccactttgggcattcagctctcaccgtataacctcagcactctggaagacctgaacaccagatggaagcttctgcaggtggccgtcgaggaccgagtcaggcagctgcatgaagcccacagggactttggtccagcatctcagcactttctttccacgtctgtccagggtccctgggagagagccatctcgccaaacaaagtgccctactatatcaaccacgagactcaaacaacttgctgggaccatcccaaaatgacagagctctaccagtctttagctgacctgaataatgtcagattctcagcttataggactgccatgaaactccgaagactgcagaaggccctttgcttggatctcttgagcctgtcagctgcatgtgatgccttggaccagcacaacctcaagcaaaatgaccagcccatggatatcctgcagattattaattgtttgaccactatttatgaccgcctggagcaagagcacaacaatttggtcaacgtccctctctgcgtggatatgtgtctgaactggctgctgaatgtttatgatacgggacgaacagggaggatccgtgtcctgtcttttaaaactggcatcatttccctgtgtaaagcacatttggaagacaagtacagataccttttcaagcaagtggcaagttcaacaggattttgtgaccagcgcaggctgggcctccttctgcatgattctatccaaattccaagacagttgggtgaagttgcatcctttgggggcagtaacattgagccaagtgtccggagctgcttccaatttgctaataataagccagagatcgaagcggccctcttcctagactggatgagactggaaccccagtccatggtgtggctgcccgtcctgcacagagtggctgctgcagaaactgccaagcatcaggccaaatgtaacatctgcaaagagtgtccaatcattggattcaggtacaggagtctaaagcactttaattatgacatctgccaaagctgctttttttctggtcgagttgcaaaaggccataaaatgcactatcccatggtggaatattgcactccgactacatcaggagaagatgttcgagactttgccaaggtactaaaaaacaaatttcgaaccaaaaggtattttgcgaagcatccccgaatgggctacctgccagtgcagactgtcttagagggggacaacatggaaactcccgttactctgatcaacttctggccagtagattctgcgcctgcctcgtcccctcagctttcacacgatgatactcattcacgcattgaacattatgctagcaggctagcagaaatggaaaacagcaatggatcttatctaaatgatagcatctctcctaatgagagcatagatgatgaacatttgttaatccagcattactgccaaagtttgaaccaggactcccccctgagccagcctcgtagtcctgcccagatcttgatttccttagagagtgaggaaagaggggagctagagagaatcctagcagatcttgaggaagaaaacaggaatctgcaagcagaatatgaccgtctaaagcagcagcacgaacataaaggcctgtccccactgccgtcccctcctgaaatgatgcccacctctccccagagtccccgggatgctgagctcattgctgaggccaagctactgcgtcaacacaaaggccgcctggaagccaggatgcaaatcctggaagaccacaataaacagctggagtcacagttacacaggctaaggcagctgctggagcaaccccaggcagaggccaaagtgaatggcacaacggtgtcctctccttctacctctctacagaggtccgacagcagtcagcctatgctgctccgagtggttggcagtcaaacttcggactccatgggtgaggaagatcttctcagtcctccccaggacacaagcacagggttagaggaggtgatggagcaactcaacaactccttccctagttcaagaggacacaatgtaggaagtcttttccacatggcagatgatttgggcagagcgatggagtccttagtatcagtcatgacagatgaagaaggagcagaataaatgttttacaactcctgattcccgcatggtttttataatattcatacaacaaagaggattagacagtaagagtttacaagaaataaatctatatttttgtgaagggtagtggtattatactgtagatttcagtagtttctaagtctgttattgttttgttaacaatggcaggttttacacgtctatgcaattgtacaaaaaagttataagaaaactacatgtaaaatcttgatagctaaataacttgccatttctttatatggaacgcattttgggttgtttaaaaatttataacagttataaagaaagattgtaaactaaagtgtgctttataaaaaaaagttgtttataaaaacccctaaaaacaaaacaaacacacacacacacacatacacacacacacacaaaactttgaggcagcgcattgttttgcatccttttggcgtgatatccatatgaaattcatggctttttctttttttgcatattaaagataagacttcctctaccaccacaccaaatgactactacacactgctcatttgagaactgtcagctgagtggggcaggcttgagttttcatttcatatatctatatgtctataagtatataaatactatagttatatagataaagagatacgaatttctatagactgactttttccattttttaaatgttcatgtcacatcctaatagaaagaaattacttctagtcagtcatccaggcttacctgcttggtctagaatggatttttcccggagccggaagccaggaggaaactacaccacactaaaacattgtctacagctccagatgtttctcattttaaacaactttccactgacaacgaaagtaaagtaaagtattggatttttttaaagggaacatgtgaatgaatacacaggacttattatatcagagtgagtaatcggttggttggttgattgattgattgattgatacattcagcttcctgctgctagcaatgccacgatttagatttaatgatgcttcagtggaaatcaatcagaaggtattctgaccttgtgaacatcagaaggtattttttaactcccaagcagtagcaggacgatgatagggctggagggctatggattcccagcccatccctgtgaaggagtaggccactctttaagtgaaggattggatgattgttcataatacataaagttctctgtaattacaactaaattattatgccctcttctcacagtcaaaaggaactgggtggtttggtttttgttgcttttttagatttattgtcccatgtgggatgagtttttaaatgccacaagacataatttaaaataaataaactttgggaaaaggtgtaaaacagtagccccatcacatttgtgatactgacaggtatcaacccagaagcccatgaactgtgtttccatcctttgcatttctctgcgagtagttccacacaggtttgtaagtaagtaagaaagaaggcaaattgattcaaatgttacaaaaaaacccttcttggtggattagacaggttaaatatataaacaaacaaacaaaaattgctcaaaaaagaggagaaaagctcaagaggaaaagctaaggactggtaggaaaaagctttactctttcatgccattttatttctttttgatttttaaatcattcattcaatagataccaccgtgtgacctataattttgcaaatctgttacctctgacatcaagtgtaattagcttttggagagtgggctgacatcaagtgtaattagcttttggagagtgggttttgtccattattaataattaattaattaacatcaaacacggcttctcatgctatttctacctcactttggttttggggtgttcctgataattgtgcacacctgagttcacagcttcaccacttgtccattgcgttattttctttttcctttataattctttctttttccttcataattttcaaaagaaaacccaaagctctaaggtaacaaattaccaaattacatgaagatttggtttttgtcttgcatttttttcctttatgtgacgctggaccttttctttacccaaggatttttaaaactcagatttaaaacaaggggttactttacatcctactaagaagtttaagtaagtaagtttcattctaaaatcagaggtaaatagagtgcataaataattttgttttaatctttttgtttttcttttagacacattagctctggagtgagtctgtcataatatttgaacaaaaattgagagctttattgctgcattttaagcataattaatttggacattatttcgtgttgtgttctttataaccaccaagtattaaactgtaaatcataatgtaactgaagcataaacatcacatggcatgttttgtcattgttttcaggtactgagttcttacttgagtatcataatatattgtgttttaacaccaacactgtaacatttacgaattatttttttaaacttcagttttactgcattttcacaacatatcagacttcaccaaatatatgccttactattgtattatagtactgctttactgtgtatctcaataaagcacgcagttatgttacaaaaaa

SEQ ID NO: 449 - DNA, 13630 bp, Homo sapiens
  source 1..13630: mol_type = genomic DNA
atcagttactgtgttgactcactcagtgttgggatcactcactttccccctacaggactcagatctgggaggcaattaccttcggagaaaaacgaataggaaaaactgaagtgttactttttttaaagctgctgaagtttgttggtttctcattgtttttaagcctactggagcaataaagtttgaagaacttttaccaggttttttttatcgctgccttgatatacacttttcaaaatgctttggtgggaagaagtagaggactgttatgaaagagaagatgttcaaaagaaaacattcacaaaatgggtaaatgcacaattttctaagtttgggaagcagcatattgagaacctcttcagtgacctacaggatgggaggcgcctcctagacctcctcgaaggcctgacagggcaaaaactgccaaaagaaaaaggatccacaagagttcatgccctgaacaatgtcaacaaggcactgcgggttttgcagaacaataatgttgatttagtgaatattggaagtactgacatcgtagatggaaatcataaactgactcttggtttgatttggaatataatcctccactggcaggtcaaaaatgtaatgaaaaatatcatggctggattgcaacaaaccaacagtgaaaagattctcctgagctgggtccgacaatcaactcgtaattatccacaggttaatgtaatcaacttcaccaccagctggtctgatggcctggctttgaatgctctcatccatagtcataggccagacctatttgactggaatagtgtggtttgccagcagtcagccacacaacgactggaacatgcattcaacatcgccagatatcaattaggcatagagaaactactcgatcctgaagatgttgataccacctatccagataagaagtccatcttaatgtacatcacatcactcttccaagttttgcctcaacaagtgagcattgaagccatccaggaagtggaaatgttgccaaggccacctaaagtgactaaagaagaacattttcagttacatcatcaaatgcactattctcaacagatcacggtcagtctagcacagggatatgagagaacttcttcccctaagcctcgattcaagagctatgcctacacacaggctgcttatgtcaccacctctgaccctacacggagcccatttccttcacagcatttggaagctcctgaagacaagtcatttggcagttcattgatggagagtgaagtaaacctggaccgttatcaaacagctttagaagaagtattatcgtggcttctttctgctgaggacacattgcaagcacaaggagagatttctaatgatgtggaagtggtgaaagaccagtttcatactcatgaggggtacatgatggatttgacagcccatcagggccgggttggtaatattctacaattgggaagtaagctgattggaacaggaaaattatcagaagatgaagaaactgaagtacaagagcagatgaatctcctaaattcaagatgggaatgcctcagggtagctagcatggaaaaacaaagcaatttacatagagttttaatggatctccagaatcagaaactgaaagagttgaatgactggctaacaaaaacagaagaaagaacaaggaaaatggaggaagagcctcttggacctgatcttgaagacctaaaacgccaagtacaacaacataaggtgcttcaagaagatctagaacaagaacaagtcagggtcaattctctcactcacatggtggtggtagttgatgaatctagtggagatcacgcaactgctgctttggaagaacaacttaaggtattgggagatcgatgggcaaacatctgtagatggacagaagaccgctgggttcttttacaagacatccttctcaaatggcaacgtcttactgaagaacagtgcctttttagtgcatggctttcagaaaaagaagatgcagtgaacaagattcacacaactggctttaaagatcaaaatgaaatgttatcaagtcttcaaaaactggccgttttaaaagcggatctagaaaagaaaaagcaatccatgggcaaactgtattcactcaaacaagatcttctttcaacactgaagaataagtcagtgacccagaagacggaagcatggctggataactttgcccggtgttgggataatttagtccaaaaacttgaaaagagtacagcacagatttcacaggctgtcaccaccactcagccatcactaacacagacaactgtaatggaaacagtaactacggtgaccacaagggaacagatcctggtaaagcatgctcaagaggaacttccaccaccacctccccaaaagaagaggcagattactgtggattctgaaattaggaaaaggttggatgttgatataactgaacttcacagctggattactcgctcagaagctgtgttgcagagtcctgaatttgcaatctttcggaaggaaggcaacttctcagacttaaaagaaaaagtcaatgccatagagcgagaaaaagctgagaagttcagaaaactgcaagatgccagcagatcagctcaggccctggtggaacagatggtgaatgagggtgttaatgcagatagcatcaaacaagcctcagaacaactgaacagccggtggatcgaattctgccagttgctaagtgagagacttaactggctggagtatcagaacaacatcatcgctttctataatcagctacaacaattggagcagatgacaactactgctgaaaactggttgaaaatccaacccaccaccccatcagagccaacagcaattaaaagtcagttaaaaatttgtaaggatgaagtcaaccggctatcagatcttcaacctcaaattgaacgattaaaaattcaaagcatagccctgaaagagaaaggacaaggacccatgttcctggatgcagactttgtggcctttacaaatcattttaagcaagtcttttctgatgtgcaggccagagagaaagagctacagacaatttttgacactttgccaccaatgcgctatcaggagaccatgagtgccatcaggacatgggtccagcagtcagaaaccaaactctccatacctcaacttagtgtcaccgactatgaaatcatggagcagagactcggggaattgcaggctttacaaagttctctgcaagagcaacaaagtggcctatactatctcagcaccactgtgaaagagatgtcgaagaaagcgccctctgaaattagccggaaatatcaatcagaatttgaagaaattgagggacgctggaagaagctctcctcccagctggttgagcattgtcaaaagctagaggagcaaatgaataaactccgaaaaattcagaatcacatacaaaccctgaagaaatggatggctgaagttgatgtttttctgaaggaggaatggcctgcccttggggattcagaaattctaaaaaagcagctgaaacagtgcagacttttagtcagtgatattcagacaattcagcccagtctaaacagtgtcaatgaaggtgggcagaagataaagaatgaagcagagccagagtttgcttcgagacttgagacagaactcaaagaacttaacactcagtgggatcacatgtgccaacaggtctatgccagaaaggaggccttgaagggaggtttggagaaaactgtaagcctccagaaagatctatcagagatgcacgaatggatgacacaagctgaagaagagtatcttgagagagattttgaatataaaactccagatgaattacagaaagcagttgaagagatgaagagagctaaagaagaggcccaacaaaaagaagcgaaagtgaaactccttactgagtctgtaaatagtgtcatagctcaagctccacctgtagcacaagaggccttaaaaaaggaacttgaaactctaaccaccaactaccagtggctctgcactaggctgaatgggaaatgcaagactttggaagaagtttgggcatgttggcatgagttattgtcatacttggagaaagcaaacaagtggctaaatgaagtagaatttaaacttaaaaccactgaaaacattcctggcggagctgaggaaatctctgaggtgctagattcacttgaaaatttgatgcgacattcagaggataacccaaatcagattcgcatattggcacagaccctaacagatggcggagtcatggatgagctaatcaatgaggaacttgagacatttaattctcgttggagggaactacatgaagaggctgtaaggaggcaaaagttgcttgaacagagcatccagtctgcccaggagactgaaaaatccttacacttaatccaggagtccctcacattcattgacaagcagttggcagcttatattgcagacaaggtggacgcagctcaaatgcctcaggaagcccagaaaatccaatctgatttgacaagtcatgagatcagtttagaagaaatgaagaaacataatcaggggaaggaggctgcccaaagagtcctgtctcagattgatgttgcacagaaaaaattacaagatgtctccatgaagtttcgattattccagaaaccagccaattttgagcagcgtctacaagaaagtaagatgattttagatgaagtgaagatgcacttgcctgcattggaaacaaagagtgtggaacaggaagtagtacagtcacagctaaatcattgtgtgaacttgtataaaagtctgagtgaagtgaagtctgaagtggaaatggtgataaagactggacgtcagattgtacagaaaaagcagacggaaaatcccaaagaacttgatgaaagagtaacagctttgaaattgcattataatgagctgggagcaaaggtaacagaaagaaagcaacagttggagaaatgcttgaaattgtcccgtaagatgcgaaaggaaatgaatgtcttgacagaatggctggcagctacagatatggaattgacaaagagatcagcagttgaaggaatgcctagtaatttggattctgaagttgcctggggaaaggctactcaaaaagagattgagaaacagaaggtgcacctgaagagtatcacagaggtaggagaggccttgaaaacagttttgggcaagaaggagacgttggtggaagataaactcagtcttctgaatagtaactggatagctgtcacctcccgagcagaagagtggttaaatcttttgttggaataccagaaacacatggaaacttttgaccagaatgtggaccacatcacaaagtggatcattcaggctgacacacttttggatgaatcagagaaaaagaaaccccagcaaaaagaagacgtgcttaagcgtttaaaggcagaactgaatgacatacgcccaaaggtggactctacacgtgaccaagcagcaaacttgatggcaaaccgcggtgaccactgcaggaaattagtagagccccaaatctcagagctcaaccatcgatttgcagccatttcacacagaattaagactggaaaggcctccattcctttgaaggaattggagcagtttaactcagatatacaaaaattgcttgaaccactggaggctgaaattcagcagggggtgaatctgaaagaggaagacttcaataaagatatgaatgaagacaatgagggtactgtaaaagaattgttgcaaagaggagacaacttacaacaaagaatcacagatgagagaaagcgagaggaaataaagataaaacagcagctgttacagacaaaacataatgctctcaaggatttgaggtctcaaagaagaaaaaaggctctagaaatttctcatcagtggtatcagtacaagaggcaggctgatgatctcctgaaatgcttggatgacattgaaaaaaaattagccagcctacctgagcccagagatgaaaggaaaataaaggaaattgatcgggaattgcagaagaagaaagaggagctgaatgcagtgcgtaggcaagctgagggcttgtctgaggatggggccgcaatggcagtggagccaactcagatccagctcagcaagcgctggcgggaaattgagagcaaatttgctcagtttcgaagactcaactttgcacaaattcacactgtccgtgaagaaacgatgatggtgatgactgaagacatgcctttggaaatttcttatgtgccttctacttatttgactgaaatcactcatgtctcacaagccctattagaagtggaacaacttctcaatgctcctgacctctgtgctaaggactttgaagatctctttaagcaagaggagtctctgaagaatataaaagatagtctacaacaaagctcaggtcggattgacattattcatagcaagaagacagcagcattgcaaagtgcaacgcctgtggaaagggtgaagctacaggaagctctctcccagcttgatttccaatgggaaaaagttaacaaaatgtacaaggaccgacaagggcgatttgacagatctgttgagaaatggcggcgttttcattatgatataaagatatttaatcagtggctaacagaagctgaacagtttctcagaaagacacaaattcctgagaattgggaacatgctaaatacaaatggtatcttaaggaactccaggatggcattgggcagcggcaaactgttgtcagaacattgaatgcaactggggaagaaataattcagcaatcctcaaaaacagatgccagtattctacaggaaaaattgggaagcctgaatctgcggtggcaggaggtctgcaaacagctgtcagacagaaaaaagaggctagaagaacaaaagaatatcttgtcagaatttcaaagagatttaaatgaatttgttttatggttggaggaagcagataacattgctagtatcccacttgaacctggaaaagagcagcaactaaaagaaaagcttgagcaagtcaagttactggtggaagagttgcccctgcgccagggaattctcaaacaattaaatgaaactggaggacccgtgcttgtaagtgctcccataagcccagaagagcaagataaacttgaaaataagctcaagcagacaaatctccagtggataaaggtttccagagctttacctgagaaacaaggagaaattgaagctcaaataaaagaccttgggcagcttgaaaaaaagcttgaagaccttgaagagcagttaaatcatctgctgctgtggttatctcctattaggaatcagttggaaatttataaccaaccaaaccaagaaggaccatttgacgttaaggaaactgaaatagcagttcaagctaaacaaccggatgtggaagagattttgtctaaagggcagcatttgtacaaggaaaaaccagccactcagccagtgaagaggaagttagaagatctgagctctgagtggaaggcggtaaaccgtttacttcaagagctgagggcaaagcagcctgacctagctcctggactgaccactattggagcctctcctactcagactgttactctggtgacacaacctgtggttactaaggaaactgccatctccaaactagaaatgccatcttccttgatgttggaggtacctgctctggcagatttcaaccgggcttggacagaacttaccgactggctttctctgcttgatcaagttataaaatcacagagggtgatggtgggtgaccttgaggatatcaacgagatgatcatcaagcagaaggcaacaatgcaggatttggaacagaggcgtccccagttggaagaactcattaccgctgcccaaaatttgaaaaacaagaccagcaatcaagaggctagaacaatcattacggatcgaattgaaagaattcagaatcagtgggatgaagtacaagaacaccttcagaaccggaggcaacagttgaatgaaatgttaaaggattcaacacaatggctggaagctaaggaagaagctgagcaggtcttaggacaggccagagccaagcttgagtcatggaaggagggtccctatacagtagatgcaatccaaaagaaaatcacagaaaccaagcagttggccaaagacctccgccagtggcagacaaatgtagatgtggcaaatgacttggccctgaaacttctccgggattattctgcagatgataccagaaaagtccacatgataacagagaatatcaatgcctcttggagaagcattcataaaagggtgagtgagcgagaggctgctttggaagaaactcatagattactgcaacagttccccctggacctggaaaagtttcttgcctggcttacagaagctgaaacaactgccaatgtcctacaggatgctacccgtaaggaaaggctcctagaagactccaagggagtaaaagagctgatgaaacaatggcaagacctccaaggtgaaattgaagctcacacagatgtttatcacaacctggatgaaaacagccaaaaaatcctgagatccctggaaggttccgatgatgcagtcctgttacaaagacgtttggataacatgaacttcaagtggagtgaacttcggaaaaagtctctcaacattaggtcccatttggaagccagttctgaccagtggaagcgtctgcacctttctctgcaggaacttctggtgtggctacagctgaaagatgatgaattaagccggcaggcacctattggaggcgactttccagcagttcagaagcagaacgatgtacatagggccttcaagagggaattgaaaactaaagaacctgtaatcatgagtactcttgagactgtacgaatatttctgacagagcagcctttggaaggactagagaaactctaccaggagcccagagagctgcctcctgaggagagagcccagaatgtcactcggcttctacgaaagcaggctgaggaggtcaatactgagtgggaaaaattgaacctgcactccgctgactggcagagaaaaatagatgagacccttgaaagactccgggaacttcaagaggccacggatgagctggacctcaagctgcgccaagctgaggtgatcaagggatcctggcagcccgtgggcgatctcctcattgactctctccaagatcacctcgagaaagtcaaggcacttcgaggagaaattgcgcctctgaaagagaacgtgagccacgtcaatgaccttgctcgccagcttaccactttgggcattcagctctcaccgtataacctcagcactctggaagacctgaacaccagatggaagcttctgcaggtggccgtcgaggaccgagtcaggcagctgcatgaagcccacagggactttggtccagcatctcagcactttctttccacgtctgtccagggtccctgggagagagccatctcgccaaacaaagtgccctactatatcaaccacgagactcaaacaacttgctgggaccatcccaaaatgacagagctctaccagtctttagctgacctgaataatgtcagattctcagcttataggactgccatgaaactccgaagactgcagaaggccctttgcttggatctcttgagcctgtcagctgcatgtgatgccttggaccagcacaacctcaagcaaaatgaccagcccatggatatcctgcagattattaattgtttgaccactatttatgaccgcctggagcaagagcacaacaatttggtcaacgtccctctctgcgtggatatgtgtctgaactggctgctgaatgtttatgatacgggacgaacagggaggatccgtgtcctgtcttttaaaactggcatcatttccctgtgtaaagcacatttggaagacaagtacagataccttttcaagcaagtggcaagttcaacaggattttgtgaccagcgcaggctgggcctccttctgcatgattctatccaaattccaagacagttgggtgaagttgcatcctttgggggcagtaacattgagccaagtgtccggagctgcttccaatttgctaataataagccagagatcgaagcggccctcttcctagactggatgagactggaaccccagtccatggtgtggctgcccgtcctgcacagagtggctgctgcagaaactgccaagcatcaggccaaatgtaacatctgcaaagagtgtccaatcattggattcaggtacaggagtctaaagcactttaattatgacatctgccaaagctgctttttttctggtcgagttgcaaaaggccataaaatgcactatcccatggtggaatattgcactccgactacatcaggagaagatgttcgagactttgccaaggtactaaaaaacaaatttcgaaccaaaaggtattttgcgaagcatccccgaatgggctacctgccagtgcagactgtcttagagggggacaacatggaaacgaatctgcaagcagaatatgaccgtctaaagcagcagcacgaacataaaggcctgtccccactgccgtcccctcctgaaatgatgcccacctctccccagagtccccgggatgctgagctcattgctgaggccaagctactgcgtcaacacaaaggccgcctggaagccaggatgcaaatcctggaagaccacaataaacagctggagtcacagttacacaggctaaggcagctgctggagcaaccccaggcagaggccaaagtgaatggcacaacggtgtcctctccttctacctctctacagaggtccgacagcagtcagcctatgctgctccgagtggttggcagtcaaacttcggactccatgggtgaggaagatcttctcagtcctccccaggacacaagcacagggttagaggaggtgatggagcaactcaacaactccttccctagttcaagaggacacaatgtaggaagtcttttccacatggcagatgatttgggcagagcgatggagtccttagtatcagtcatgacagatgaagaaggagcagaataaatgttttacaactcctgattcccgcatggtttttataatattcatacaacaaagaggattagacagtaagagtttacaagaaataaatctatatttttgtgaagggtagtggtattatactgtagatttcagtagtttctaagtctgttattgttttgttaacaatggcaggttttacacgtctatgcaattgtacaaaaaagttataagaaaactacatgtaaaatcttgatagctaaataacttgccatttctttatatggaacgcattttgggttgtttaaaaatttataacagttataaagaaagattgtaaactaaagtgtgctttataaaaaaaagttgtttataaaaacccctaaaaacaaaacaaacacacacacacacacatacacacacacacacaaaactttgaggcagcgcattgttttgcatccttttggcgtgatatccatatgaaattcatggctttttctttttttgcatattaaagataagacttcctctaccaccacaccaaatgactactacacactgctcatttgagaactgtcagctgagtggggcaggcttgagttttcatttcatatatctatatgtctataagtatataaatactatagttatatagataaagagatacgaatttctatagactgactttttccattttttaaatgttcatgtcacatcctaatagaaagaaattacttctagtcagtcatccaggcttacctgcttggtctagaatggatttttcccggagccggaagccaggaggaaactacaccacactaaaacattgtctacagctccagatgtttctcattttaaacaactttccactgacaacgaaagtaaagtaaagtattggatttttttaaagggaacatgtgaatgaatacacaggacttattatatcagagtgagtaatcggttggttggttgattgattgattgattgatacattcagcttcctgctgctagcaatgccacgatttagatttaatgatgcttcagtggaaatcaatcagaaggtattctgaccttgtgaacatcagaaggtattttttaactcccaagcagtagcaggacgatgatagggctggagggctatggattcccagcccatccctgtgaaggagtaggccactctttaagtgaaggattggatgattgttcataatacataaagttctctgtaattacaactaaattattatgccctcttctcacagtcaaaaggaactgggtggtttggtttttgttgcttttttagatttattgtcccatgtgggatgagtttttaaatgccacaagacataatttaaaataaataaactttgggaaaaggtgtaaaacagtagccccatcacatttgtgatactgacaggtatcaacccagaagcccatgaactgtgtttccatcctttgcatttctctgcgagtagttccacacaggtttgtaagtaagtaagaaagaaggcaaattgattcaaatgttacaaaaaaacccttcttggtggattagacaggttaaatatataaacaaacaaacaaaaattgctcaaaaaagaggagaaaagctcaagaggaaaagctaaggactggtaggaaaaagctttactctttcatgccattttatttctttttgatttttaaatcattcattcaatagataccaccgtgtgacctataattttgcaaatctgttacctctgacatcaagtgtaattagcttttggagagtgggctgacatcaagtgtaattagcttttggagagtgggttttgtccattattaataattaattaattaacatcaaacacggcttctcatgctatttctacctcactttggttttggggtgttcctgataattgtgcacacctgagttcacagcttcaccacttgtccattgcgttattttctttttcctttataattctttctttttccttcataattttcaaaagaaaacccaaagctctaaggtaacaaattaccaaattacatgaagatttggtttttgtcttgcatttttttcctttatgtgacgctggaccttttctttacccaaggatttttaaaactcagatttaaaacaaggggttactttacatcctactaagaagtttaagtaagtaagtttcattctaaaatcagaggtaaatagagtgcataaataattttgttttaatctttttgtttttcttttagacacattagctctggagtgagtctgtcataatatttgaacaaaaattgagagctttattgctgcattttaagcataattaatttggacattatttcgtgttgtgttctttataaccaccaagtattaaactgtaaatcataatgtaactgaagcataaacatcacatggcatgttttgtcattgttttcaggtactgagttcttacttgagtatcataatatattgtgttttaacaccaacactgtaacatttacgaattatttttttaaacttcagttttactgcattttcacaacatatcagacttcaccaaatatatgccttactattgtattatagtactgctttactgtgtatctcaataaagcacgcagttatgttacaaaaaa

SEQ ID NO: 450 - DNA, 13662 bp, Homo sapiens
  source 1..13662: mol_type = genomic DNA
atcagttactgtgttgactcactcagtgttgggatcactcactttccccctacaggactcagatctgggaggcaattaccttcggagaaaaacgaataggaaaaactgaagtgttactttttttaaagctgctgaagtttgttggtttctcattgtttttaagcctactggagcaataaagtttgaagaacttttaccaggttttttttatcgctgccttgatatacacttttcaaaatgctttggtgggaagaagtagaggactgttatgaaagagaagatgttcaaaagaaaacattcacaaaatgggtaaatgcacaattttctaagtttgggaagcagcatattgagaacctcttcagtgacctacaggatgggaggcgcctcctagacctcctcgaaggcctgacagggcaaaaactgccaaaagaaaaaggatccacaagagttcatgccctgaacaatgtcaacaaggcactgcgggttttgcagaacaataatgttgatttagtgaatattggaagtactgacatcgtagatggaaatcataaactgactcttggtttgatttggaatataatcctccactggcaggtcaaaaatgtaatgaaaaatatcatggctggattgcaacaaaccaacagtgaaaagattctcctgagctgggtccgacaatcaactcgtaattatccacaggttaatgtaatcaacttcaccaccagctggtctgatggcctggctttgaatgctctcatccatagtcataggccagacctatttgactggaatagtgtggtttgccagcagtcagccacacaacgactggaacatgcattcaacatcgccagatatcaattaggcatagagaaactactcgatcctgaagatgttgataccacctatccagataagaagtccatcttaatgtacatcacatcactcttccaagttttgcctcaacaagtgagcattgaagccatccaggaagtggaaatgttgccaaggccacctaaagtgactaaagaagaacattttcagttacatcatcaaatgcactattctcaacagatcacggtcagtctagcacagggatatgagagaacttcttcccctaagcctcgattcaagagctatgcctacacacaggctgcttatgtcaccacctctgaccctacacggagcccatttccttcacagcatttggaagctcctgaagacaagtcatttggcagttcattgatggagagtgaagtaaacctggaccgttatcaaacagctttagaagaagtattatcgtggcttctttctgctgaggacacattgcaagcacaaggagagatttctaatgatgtggaagtggtgaaagaccagtttcatactcatgaggggtacatgatggatttgacagcccatcagggccgggttggtaatattctacaattgggaagtaagctgattggaacaggaaaattatcagaagatgaagaaactgaagtacaagagcagatgaatctcctaaattcaagatgggaatgcctcagggtagctagcatggaaaaacaaagcaatttacatagagttttaatggatctccagaatcagaaactgaaagagttgaatgactggctaacaaaaacagaagaaagaacaaggaaaatggaggaagagcctcttggacctgatcttgaagacctaaaacgccaagtacaacaacataaggtgcttcaagaagatctagaacaagaacaagtcagggtcaattctctcactcacatggtggtggtagttgatgaatctagtggagatcacgcaactgctgctttggaagaacaacttaaggtattgggagatcgatgggcaaacatctgtagatggacagaagaccgctgggttcttttacaagacatccttctcaaatggcaacgtcttactgaagaacagtgcctttttagtgcatggctttcagaaaaagaagatgcagtgaacaagattcacacaactggctttaaagatcaaaatgaaatgttatcaagtcttcaaaaactggccgttttaaaagcggatctagaaaagaaaaagcaatccatgggcaaactgtattcactcaaacaagatcttctttcaacactgaagaataagtcagtgacccagaagacggaagcatggctggataactttgcccggtgttgggataatttagtccaaaaacttgaaaagagtacagcacagatttcacaggctgtcaccaccactcagccatcactaacacagacaactgtaatggaaacagtaactacggtgaccacaagggaacagatcctggtaaagcatgctcaagaggaacttccaccaccacctccccaaaagaagaggcagattactgtggattctgaaattaggaaaaggttggatgttgatataactgaacttcacagctggattactcgctcagaagctgtgttgcagagtcctgaatttgcaatctttcggaaggaaggcaacttctcagacttaaaagaaaaagtcaatgccatagagcgagaaaaagctgagaagttcagaaaactgcaagatgccagcagatcagctcaggccctggtggaacagatggtgaatgagggtgttaatgcagatagcatcaaacaagcctcagaacaactgaacagccggtggatcgaattctgccagttgctaagtgagagacttaactggctggagtatcagaacaacatcatcgctttctataatcagctacaacaattggagcagatgacaactactgctgaaaactggttgaaaatccaacccaccaccccatcagagccaacagcaattaaaagtcagttaaaaatttgtaaggatgaagtcaaccggctatcagatcttcaacctcaaattgaacgattaaaaattcaaagcatagccctgaaagagaaaggacaaggacccatgttcctggatgcagactttgtggcctttacaaatcattttaagcaagtcttttctgatgtgcaggccagagagaaagagctacagacaatttttgacactttgccaccaatgcgctatcaggagaccatgagtgccatcaggacatgggtccagcagtcagaaaccaaactctccatacctcaacttagtgtcaccgactatgaaatcatggagcagagactcggggaattgcaggctttacaaagttctctgcaagagcaacaaagtggcctatactatctcagcaccactgtgaaagagatgtcgaagaaagcgccctctgaaattagccggaaatatcaatcagaatttgaagaaattgagggacgctggaagaagctctcctcccagctggttgagcattgtcaaaagctagaggagcaaatgaataaactccgaaaaattcagaatcacatacaaaccctgaagaaatggatggctgaagttgatgtttttctgaaggaggaatggcctgcccttggggattcagaaattctaaaaaagcagctgaaacagtgcagacttttagtcagtgatattcagacaattcagcccagtctaaacagtgtcaatgaaggtgggcagaagataaagaatgaagcagagccagagtttgcttcgagacttgagacagaactcaaagaacttaacactcagtgggatcacatgtgccaacaggtctatgccagaaaggaggccttgaagggaggtttggagaaaactgtaagcctccagaaagatctatcagagatgcacgaatggatgacacaagctgaagaagagtatcttgagagagattttgaatataaaactccagatgaattacagaaagcagttgaagagatgaagagagctaaagaagaggcccaacaaaaagaagcgaaagtgaaactccttactgagtctgtaaatagtgtcatagctcaagctccacctgtagcacaagaggccttaaaaaaggaacttgaaactctaaccaccaactaccagtggctctgcactaggctgaatgggaaatgcaagactttggaagaagtttgggcatgttggcatgagttattgtcatacttggagaaagcaaacaagtggctaaatgaagtagaatttaaacttaaaaccactgaaaacattcctggcggagctgaggaaatctctgaggtgctagattcacttgaaaatttgatgcgacattcagaggataacccaaatcagattcgcatattggcacagaccctaacagatggcggagtcatggatgagctaatcaatgaggaacttgagacatttaattctcgttggagggaactacatgaagaggctgtaaggaggcaaaagttgcttgaacagagcatccagtctgcccaggagactgaaaaatccttacacttaatccaggagtccctcacattcattgacaagcagttggcagcttatattgcagacaaggtggacgcagctcaaatgcctcaggaagcccagaaaatccaatctgatttgacaagtcatgagatcagtttagaagaaatgaagaaacataatcaggggaaggaggctgcccaaagagtcctgtctcagattgatgttgcacagaaaaaattacaagatgtctccatgaagtttcgattattccagaaaccagccaattttgagcagcgtctacaagaaagtaagatgattttagatgaagtgaagatgcacttgcctgcattggaaacaaagagtgtggaacaggaagtagtacagtcacagctaaatcattgtgtgaacttgtataaaagtctgagtgaagtgaagtctgaagtggaaatggtgataaagactggacgtcagattgtacagaaaaagcagacggaaaatcccaaagaacttgatgaaagagtaacagctttgaaattgcattataatgagctgggagcaaaggtaacagaaagaaagcaacagttggagaaatgcttgaaattgtcccgtaagatgcgaaaggaaatgaatgtcttgacagaatggctggcagctacagatatggaattgacaaagagatcagcagttgaaggaatgcctagtaatttggattctgaagttgcctggggaaaggctactcaaaaagagattgagaaacagaaggtgcacctgaagagtatcacagaggtaggagaggccttgaaaacagttttgggcaagaaggagacgttggtggaagataaactcagtcttctgaatagtaactggatagctgtcacctcccgagcagaagagtggttaaatcttttgttggaataccagaaacacatggaaacttttgaccagaatgtggaccacatcacaaagtggatcattcaggctgacacacttttggatgaatcagagaaaaagaaaccccagcaaaaagaagacgtgcttaagcgtttaaaggcagaactgaatgacatacgcccaaaggtggactctacacgtgaccaagcagcaaacttgatggcaaaccgcggtgaccactgcaggaaattagtagagccccaaatctcagagctcaaccatcgatttgcagccatttcacacagaattaagactggaaaggcctccattcctttgaaggaattggagcagtttaactcagatatacaaaaattgcttgaaccactggaggctgaaattcagcagggggtgaatctgaaagaggaagacttcaataaagatatgaatgaagacaatgagggtactgtaaaagaattgttgcaaagaggagacaacttacaacaaagaatcacagatgagagaaagcgagaggaaataaagataaaacagcagctgttacagacaaaacataatgctctcaaggatttgaggtctcaaagaagaaaaaaggctctagaaatttctcatcagtggtatcagtacaagaggcaggctgatgatctcctgaaatgcttggatgacattgaaaaaaaattagccagcctacctgagcccagagatgaaaggaaaataaaggaaattgatcgggaattgcagaagaagaaagaggagctgaatgcagtgcgtaggcaagctgagggcttgtctgaggatggggccgcaatggcagtggagccaactcagatccagctcagcaagcgctggcgggaaattgagagcaaatttgctcagtttcgaagactcaactttgcacaaattcacactgtccgtgaagaaacgatgatggtgatgactgaagacatgcctttggaaatttcttatgtgccttctacttatttgactgaaatcactcatgtctcacaagccctattagaagtggaacaacttctcaatgctcctgacctctgtgctaaggactttgaagatctctttaagcaagaggagtctctgaagaatataaaagatagtctacaacaaagctcaggtcggattgacattattcatagcaagaagacagcagcattgcaaagtgcaacgcctgtggaaagggtgaagctacaggaagctctctcccagcttgatttccaatgggaaaaagttaacaaaatgtacaaggaccgacaagggcgatttgacagatctgttgagaaatggcggcgttttcattatgatataaagatatttaatcagtggctaacagaagctgaacagtttctcagaaagacacaaattcctgagaattgggaacatgctaaatacaaatggtatcttaaggaactccaggatggcattgggcagcggcaaactgttgtcagaacattgaatgcaactggggaagaaataattcagcaatcctcaaaaacagatgccagtattctacaggaaaaattgggaagcctgaatctgcggtggcaggaggtctgcaaacagctgtcagacagaaaaaagaggctagaagaacaaaagaatatcttgtcagaatttcaaagagatttaaatgaatttgttttatggttggaggaagcagataacattgctagtatcccacttgaacctggaaaagagcagcaactaaaagaaaagcttgagcaagtcaagttactggtggaagagttgcccctgcgccagggaattctcaaacaattaaatgaaactggaggacccgtgcttgtaagtgctcccataagcccagaagagcaagataaacttgaaaataagctcaagcagacaaatctccagtggataaaggtttccagagctttacctgagaaacaaggagaaattgaagctcaaataaaagaccttgggcagcttgaaaaaaagcttgaagaccttgaagagcagttaaatcatctgctgctgtggttatctcctattaggaatcagttggaaatttataaccaaccaaaccaagaaggaccatttgacgttaaggaaactgaaatagcagttcaagctaaacaaccggatgtggaagagattttgtctaaagggcagcatttgtacaaggaaaaaccagccactcagccagtgaagaggaagttagaagatctgagctctgagtggaaggcggtaaaccgtttacttcaagagctgagggcaaagcagcctgacctagctcctggactgaccactattggagcctctcctactcagactgttactctggtgacacaacctgtggttactaaggaaactgccatctccaaactagaaatgccatcttccttgatgttggaggtacctgctctggcagatttcaaccgggcttggacagaacttaccgactggctttctctgcttgatcaagttataaaatcacagagggtgatggtgggtgaccttgaggatatcaacgagatgatcatcaagcagaaggcaacaatgcaggatttggaacagaggcgtccccagttggaagaactcattaccgctgcccaaaatttgaaaaacaagaccagcaatcaagaggctagaacaatcattacggatcgaattgaaagaattcagaatcagtgggatgaagtacaagaacaccttcagaaccggaggcaacagttgaatgaaatgttaaaggattcaacacaatggctggaagctaaggaagaagctgagcaggtcttaggacaggccagagccaagcttgagtcatggaaggagggtccctatacagtagatgcaatccaaaagaaaatcacagaaaccaagcagttggccaaagacctccgccagtggcagacaaatgtagatgtggcaaatgacttggccctgaaacttctccgggattattctgcagatgataccagaaaagtccacatgataacagagaatatcaatgcctcttggagaagcattcataaaagggtgagtgagcgagaggctgctttggaagaaactcatagattactgcaacagttccccctggacctggaaaagtttcttgcctggcttacagaagctgaaacaactgccaatgtcctacaggatgctacccgtaaggaaaggctcctagaagactccaagggagtaaaagagctgatgaaacaatggcaagacctccaaggtgaaattgaagctcacacagatgtttatcacaacctggatgaaaacagccaaaaaatcctgagatccctggaaggttccgatgatgcagtcctgttacaaagacgtttggataacatgaacttcaagtggagtgaacttcggaaaaagtctctcaacattaggtcccatttggaagccagttctgaccagtggaagcgtctgcacctttctctgcaggaacttctggtgtggctacagctgaaagatgatgaattaagccggcaggcacctattggaggcgactttccagcagttcagaagcagaacgatgtacatagggccttcaagagggaattgaaaactaaagaacctgtaatcatgagtactcttgagactgtacgaatatttctgacagagcagcctttggaaggactagagaaactctaccaggagcccagagagctgcctcctgaggagagagcccagaatgtcactcggcttctacgaaagcaggctgaggaggtcaatactgagtgggaaaaattgaacctgcactccgctgactggcagagaaaaatagatgagacccttgaaagactccgggaacttcaagaggccacggatgagctggacctcaagctgcgccaagctgaggtgatcaagggatcctggcagcccgtgggcgatctcctcattgactctctccaagatcacctcgagaaagtcaaggcacttcgaggagaaattgcgcctctgaaagagaacgtgagccacgtcaatgaccttgctcgccagcttaccactttgggcattcagctctcaccgtataacctcagcactctggaagacctgaacaccagatggaagcttctgcaggtggccgtcgaggaccgagtcaggcagctgcatgaagcccacagggactttggtccagcatctcagcactttctttccacgtctgtccagggtccctgggagagagccatctcgccaaacaaagtgccctactatatcaaccacgagactcaaacaacttgctgggaccatcccaaaatgacagagctctaccagtctttagctgacctgaataatgtcagattctcagcttataggactgccatgaaactccgaagactgcagaaggccctttgcttggatctcttgagcctgtcagctgcatgtgatgccttggaccagcacaacctcaagcaaaatgaccagcccatggatatcctgcagattattaattgtttgaccactatttatgaccgcctggagcaagagcacaacaatttggtcaacgtccctctctgcgtggatatgtgtctgaactggctgctgaatgtttatgatacgggacgaacagggaggatccgtgtcctgtcttttaaaactggcatcatttccctgtgtaaagcacatttggaagacaagtacagataccttttcaagcaagtggcaagttcaacaggattttgtgaccagcgcaggctgggcctccttctgcatgattctatccaaattccaagacagttgggtgaagttgcatcctttgggggcagtaacattgagccaagtgtccggagctgcttccaatttgctaataataagccagagatcgaagcggccctcttcctagactggatgagactggaaccccagtccatggtgtggctgcccgtcctgcacagagtggctgctgcagaaactgccaagcatcaggccaaatgtaacatctgcaaagagtgtccaatcattggattcaggtacaggagtctaaagcactttaattatgacatctgccaaagctgctttttttctggtcgagttgcaaaaggccataaaatgcactatcccatggtggaatattgcactccgactacatcaggagaagatgttcgagactttgccaaggtactaaaaaacaaatttcgaaccaaaaggtattttgcgaagcatccccgaatgggctacctgccagtgcagactgtcttagagggggacaacatggaaacgaatctgcaagcagaatatgaccgtctaaagcagcagcacgaacataaaggcctgtccccactgccgtcccctcctgaaatgatgcccacctctccccagagtccccgggatgctgagctcattgctgaggccaagctactgcgtcaacacaaaggccgcctggaagccaggatgcaaatcctggaagaccacaataaacagctggagtcacagttacacaggctaaggcagctgctggagcaaccccaggcagaggccaaagtgaatggcacaacggtgtcctctccttctacctctctacagaggtccgacagcagtcagcctatgctgctccgagtggttggcagtcaaacttcggactccatgggtgaggaagatcttctcagtcctccccaggacacaagcacagggttagaggaggtgatggagcaactcaacaactccttccctagttcaagaggaagaaatacccctggaaagccaatgagagaggacacaatgtaggaagtcttttccacatggcagatgatttgggcagagcgatggagtccttagtatcagtcatgacagatgaagaaggagcagaataaatgttttacaactcctgattcccgcatggtttttataatattcatacaacaaagaggattagacagtaagagtttacaagaaataaatctatatttttgtgaagggtagtggtattatactgtagatttcagtagtttctaagtctgttattgttttgttaacaatggcaggttttacacgtctatgcaattgtacaaaaaagttataagaaaactacatgtaaaatcttgatagctaaataacttgccatttctttatatggaacgcattttgggttgtttaaaaatttataacagttataaagaaagattgtaaactaaagtgtgctttataaaaaaaagttgtttataaaaacccctaaaaacaaaacaaacacacacacacacacatacacacacacacacaaaactttgaggcagcgcattgttttgcatccttttggcgtgatatccatatgaaattcatggctttttctttttttgcatattaaagataagacttcctctaccaccacaccaaatgactactacacactgctcatttgagaactgtcagctgagtggggcaggcttgagttttcatttcatatatctatatgtctataagtatataaatactatagttatatagataaagagatacgaatttctatagactgactttttccattttttaaatgttcatgtcacatcctaatagaaagaaattacttctagtcagtcatccaggcttacctgcttggtctagaatggatttttcccggagccggaagccaggaggaaactacaccacactaaaacattgtctacagctccagatgtttctcattttaaacaactttccactgacaacgaaagtaaagtaaagtattggatttttttaaagggaacatgtgaatgaatacacaggacttattatatcagagtgagtaatcggttggttggttgattgattgattgattgatacattcagcttcctgctgctagcaatgccacgatttagatttaatgatgcttcagtggaaatcaatcagaaggtattctgaccttgtgaacatcagaaggtattttttaactcccaagcagtagcaggacgatgatagggctggagggctatggattcccagcccatccctgtgaaggagtaggccactctttaagtgaaggattggatgattgttcataatacataaagttctctgtaattacaactaaattattatgccctcttctcacagtcaaaaggaactgggtggtttggtttttgttgcttttttagatttattgtcccatgtgggatgagtttttaaatgccacaagacataatttaaaataaataaactttgggaaaaggtgtaaaacagtagccccatcacatttgtgatactgacaggtatcaacccagaagcccatgaactgtgtttccatcctttgcatttctctgcgagtagttccacacaggtttgtaagtaagtaagaaagaaggcaaattgattcaaatgttacaaaaaaacccttcttggtggattagacaggttaaatatataaacaaacaaacaaaaattgctcaaaaaagaggagaaaagctcaagaggaaaagctaaggactggtaggaaaaagctttactctttcatgccattttatttctttttgatttttaaatcattcattcaatagataccaccgtgtgacctataattttgcaaatctgttacctctgacatcaagtgtaattagcttttggagagtgggctgacatcaagtgtaattagcttttggagagtgggttttgtccattattaataattaattaattaacatcaaacacggcttctcatgctatttctacctcactttggttttggggtgttcctgataattgtgcacacctgagttcacagcttcaccacttgtccattgcgttattttctttttcctttataattctttctttttccttcataattttcaaaagaaaacccaaagctctaaggtaacaaattaccaaattacatgaagatttggtttttgtcttgcatttttttcctttatgtgacgctggaccttttctttacccaaggatttttaaaactcagatttaaaacaaggggttactttacatcctactaagaagtttaagtaagtaagtttcattctaaaatcagaggtaaatagagtgcataaataattttgttttaatctttttgtttttcttttagacacattagctctggagtgagtctgtcataatatttgaacaaaaattgagagctttattgctgcattttaagcataattaatttggacattatttcgtgttgtgttctttataaccaccaagtattaaactgtaaatcataatgtaactgaagcataaacatcacatggcatgttttgtcattgttttcaggtactgagttcttacttgagtatcataatatattgtgttttaacaccaacactgtaacatttacgaattatttttttaaacttcagttttactgcattttcacaacatatcagacttcaccaaatatatgccttactattgtattatagtactgctttactgtgtatctcaataaagcacgcagttatgttacaaaaaa

SEQ ID NO: 451 - DNA, 13921 bp, Homo sapiens
  source 1..13921: mol_type = genomic DNA
atcagttactgtgttgactcactcagtgttgggatcactcactttccccctacaggactcagatctgggaggcaattaccttcggagaaaaacgaataggaaaaactgaagtgttactttttttaaagctgctgaagtttgttggtttctcattgtttttaagcctactggagcaataaagtttgaagaacttttaccaggttttttttatcgctgccttgatatacacttttcaaaatgctttggtgggaagaagtagaggactgttatgaaagagaagatgttcaaaagaaaacattcacaaaatgggtaaatgcacaattttctaagtttgggaagcagcatattgagaacctcttcagtgacctacaggatgggaggcgcctcctagacctcctcgaaggcctgacagggcaaaaactgccaaaagaaaaaggatccacaagagttcatgccctgaacaatgtcaacaaggcactgcgggttttgcagaacaataatgttgatttagtgaatattggaagtactgacatcgtagatggaaatcataaactgactcttggtttgatttggaatataatcctccactggcaggtcaaaaatgtaatgaaaaatatcatggctggattgcaacaaaccaacagtgaaaagattctcctgagctgggtccgacaatcaactcgtaattatccacaggttaatgtaatcaacttcaccaccagctggtctgatggcctggctttgaatgctctcatccatagtcataggccagacctatttgactggaatagtgtggtttgccagcagtcagccacacaacgactggaacatgcattcaacatcgccagatatcaattaggcatagagaaactactcgatcctgaagatgttgataccacctatccagataagaagtccatcttaatgtacatcacatcactcttccaagttttgcctcaacaagtgagcattgaagccatccaggaagtggaaatgttgccaaggccacctaaagtgactaaagaagaacattttcagttacatcatcaaatgcactattctcaacagatcacggtcagtctagcacagggatatgagagaacttcttcccctaagcctcgattcaagagctatgcctacacacaggctgcttatgtcaccacctctgaccctacacggagcccatttccttcacagcatttggaagctcctgaagacaagtcatttggcagttcattgatggagagtgaagtaaacctggaccgttatcaaacagctttagaagaagtattatcgtggcttctttctgctgaggacacattgcaagcacaaggagagatttctaatgatgtggaagtggtgaaagaccagtttcatactcatgaggggtacatgatggatttgacagcccatcagggccgggttggtaatattctacaattgggaagtaagctgattggaacaggaaaattatcagaagatgaagaaactgaagtacaagagcagatgaatctcctaaattcaagatgggaatgcctcagggtagctagcatggaaaaacaaagcaatttacatagagttttaatggatctccagaatcagaaactgaaagagttgaatgactggctaacaaaaacagaagaaagaacaaggaaaatggaggaagagcctcttggacctgatcttgaagacctaaaacgccaagtacaacaacataaggtgcttcaagaagatctagaacaagaacaagtcagggtcaattctctcactcacatggtggtggtagttgatgaatctagtggagatcacgcaactgctgctttggaagaacaacttaaggtattgggagatcgatgggcaaacatctgtagatggacagaagaccgctgggttcttttacaagacatccttctcaaatggcaacgtcttactgaagaacagtgcctttttagtgcatggctttcagaaaaagaagatgcagtgaacaagattcacacaactggctttaaagatcaaaatgaaatgttatcaagtcttcaaaaactggccgttttaaaagcggatctagaaaagaaaaagcaatccatgggcaaactgtattcactcaaacaagatcttctttcaacactgaagaataagtcagtgacccagaagacggaagcatggctggataactttgcccggtgttgggataatttagtccaaaaacttgaaaagagtacagcacagatttcacaggctgtcaccaccactcagccatcactaacacagacaactgtaatggaaacagtaactacggtgaccacaagggaacagatcctggtaaagcatgctcaagaggaacttccaccaccacctccccaaaagaagaggcagattactgtggattctgaaattaggaaaaggttggatgttgatataactgaacttcacagctggattactcgctcagaagctgtgttgcagagtcctgaatttgcaatctttcggaaggaaggcaacttctcagacttaaaagaaaaagtcaatgccatagagcgagaaaaagctgagaagttcagaaaactgcaagatgccagcagatcagctcaggccctggtggaacagatggtgaatgagggtgttaatgcagatagcatcaaacaagcctcagaacaactgaacagccggtggatcgaattctgccagttgctaagtgagagacttaactggctggagtatcagaacaacatcatcgctttctataatcagctacaacaattggagcagatgacaactactgctgaaaactggttgaaaatccaacccaccaccccatcagagccaacagcaattaaaagtcagttaaaaatttgtaaggatgaagtcaaccggctatcagatcttcaacctcaaattgaacgattaaaaattcaaagcatagccctgaaagagaaaggacaaggacccatgttcctggatgcagactttgtggcctttacaaatcattttaagcaagtcttttctgatgtgcaggccagagagaaagagctacagacaatttttgacactttgccaccaatgcgctatcaggagaccatgagtgccatcaggacatgggtccagcagtcagaaaccaaactctccatacctcaacttagtgtcaccgactatgaaatcatggagcagagactcggggaattgcaggctttacaaagttctctgcaagagcaacaaagtggcctatactatctcagcaccactgtgaaagagatgtcgaagaaagcgccctctgaaattagccggaaatatcaatcagaatttgaagaaattgagggacgctggaagaagctctcctcccagctggttgagcattgtcaaaagctagaggagcaaatgaataaactccgaaaaattcagaatcacatacaaaccctgaagaaatggatggctgaagttgatgtttttctgaaggaggaatggcctgcccttggggattcagaaattctaaaaaagcagctgaaacagtgcagacttttagtcagtgatattcagacaattcagcccagtctaaacagtgtcaatgaaggtgggcagaagataaagaatgaagcagagccagagtttgcttcgagacttgagacagaactcaaagaacttaacactcagtgggatcacatgtgccaacaggtctatgccagaaaggaggccttgaagggaggtttggagaaaactgtaagcctccagaaagatctatcagagatgcacgaatggatgacacaagctgaagaagagtatcttgagagagattttgaatataaaactccagatgaattacagaaagcagttgaagagatgaagagagctaaagaagaggcccaacaaaaagaagcgaaagtgaaactccttactgagtctgtaaatagtgtcatagctcaagctccacctgtagcacaagaggccttaaaaaaggaacttgaaactctaaccaccaactaccagtggctctgcactaggctgaatgggaaatgcaagactttggaagaagtttgggcatgttggcatgagttattgtcatacttggagaaagcaaacaagtggctaaatgaagtagaatttaaacttaaaaccactgaaaacattcctggcggagctgaggaaatctctgaggtgctagattcacttgaaaatttgatgcgacattcagaggataacccaaatcagattcgcatattggcacagaccctaacagatggcggagtcatggatgagctaatcaatgaggaacttgagacatttaattctcgttggagggaactacatgaagaggctgtaaggaggcaaaagttgcttgaacagagcatccagtctgcccaggagactgaaaaatccttacacttaatccaggagtccctcacattcattgacaagcagttggcagcttatattgcagacaaggtggacgcagctcaaatgcctcaggaagcccagaaaatccaatctgatttgacaagtcatgagatcagtttagaagaaatgaagaaacataatcaggggaaggaggctgcccaaagagtcctgtctcagattgatgttgcacagaaaaaattacaagatgtctccatgaagtttcgattattccagaaaccagccaattttgagcagcgtctacaagaaagtaagatgattttagatgaagtgaagatgcacttgcctgcattggaaacaaagagtgtggaacaggaagtagtacagtcacagctaaatcattgtgtgaacttgtataaaagtctgagtgaagtgaagtctgaagtggaaatggtgataaagactggacgtcagattgtacagaaaaagcagacggaaaatcccaaagaacttgatgaaagagtaacagctttgaaattgcattataatgagctgggagcaaaggtaacagaaagaaagcaacagttggagaaatgcttgaaattgtcccgtaagatgcgaaaggaaatgaatgtcttgacagaatggctggcagctacagatatggaattgacaaagagatcagcagttgaaggaatgcctagtaatttggattctgaagttgcctggggaaaggctactcaaaaagagattgagaaacagaaggtgcacctgaagagtatcacagaggtaggagaggccttgaaaacagttttgggcaagaaggagacgttggtggaagataaactcagtcttctgaatagtaactggatagctgtcacctcccgagcagaagagtggttaaatcttttgttggaataccagaaacacatggaaacttttgaccagaatgtggaccacatcacaaagtggatcattcaggctgacacacttttggatgaatcagagaaaaagaaaccccagcaaaaagaagacgtgcttaagcgtttaaaggcagaactgaatgacatacgcccaaaggtggactctacacgtgaccaagcagcaaacttgatggcaaaccgcggtgaccactgcaggaaattagtagagccccaaatctcagagctcaaccatcgatttgcagccatttcacacagaattaagactggaaaggcctccattcctttgaaggaattggagcagtttaactcagatatacaaaaattgcttgaaccactggaggctgaaattcagcagggggtgaatctgaaagaggaagacttcaataaagatatgaatgaagacaatgagggtactgtaaaagaattgttgcaaagaggagacaacttacaacaaagaatcacagatgagagaaagcgagaggaaataaagataaaacagcagctgttacagacaaaacataatgctctcaaggatttgaggtctcaaagaagaaaaaaggctctagaaatttctcatcagtggtatcagtacaagaggcaggctgatgatctcctgaaatgcttggatgacattgaaaaaaaattagccagcctacctgagcccagagatgaaaggaaaataaaggaaattgatcgggaattgcagaagaagaaagaggagctgaatgcagtgcgtaggcaagctgagggcttgtctgaggatggggccgcaatggcagtggagccaactcagatccagctcagcaagcgctggcgggaaattgagagcaaatttgctcagtttcgaagactcaactttgcacaaattcacactgtccgtgaagaaacgatgatggtgatgactgaagacatgcctttggaaatttcttatgtgccttctacttatttgactgaaatcactcatgtctcacaagccctattagaagtggaacaacttctcaatgctcctgacctctgtgctaaggactttgaagatctctttaagcaagaggagtctctgaagaatataaaagatagtctacaacaaagctcaggtcggattgacattattcatagcaagaagacagcagcattgcaaagtgcaacgcctgtggaaagggtgaagctacaggaagctctctcccagcttgatttccaatgggaaaaagttaacaaaatgtacaaggaccgacaagggcgatttgacagatctgttgagaaatggcggcgttttcattatgatataaagatatttaatcagtggctaacagaagctgaacagtttctcagaaagacacaaattcctgagaattgggaacatgctaaatacaaatggtatcttaaggaactccaggatggcattgggcagcggcaaactgttgtcagaacattgaatgcaactggggaagaaataattcagcaatcctcaaaaacagatgccagtattctacaggaaaaattgggaagcctgaatctgcggtggcaggaggtctgcaaacagctgtcagacagaaaaaagaggctagaagaacaaaagaatatcttgtcagaatttcaaagagatttaaatgaatttgttttatggttggaggaagcagataacattgctagtatcccacttgaacctggaaaagagcagcaactaaaagaaaagcttgagcaagtcaagttactggtggaagagttgcccctgcgccagggaattctcaaacaattaaatgaaactggaggacccgtgcttgtaagtgctcccataagcccagaagagcaagataaacttgaaaataagctcaagcagacaaatctccagtggataaaggtttccagagctttacctgagaaacaaggagaaattgaagctcaaataaaagaccttgggcagcttgaaaaaaagcttgaagaccttgaagagcagttaaatcatctgctgctgtggttatctcctattaggaatcagttggaaatttataaccaaccaaaccaagaaggaccatttgacgttaaggaaactgaaatagcagttcaagctaaacaaccggatgtggaagagattttgtctaaagggcagcatttgtacaaggaaaaaccagccactcagccagtgaagaggaagttagaagatctgagctctgagtggaaggcggtaaaccgtttacttcaagagctgagggcaaagcagcctgacctagctcctggactgaccactattggagcctctcctactcagactgttactctggtgacacaacctgtggttactaaggaaactgccatctccaaactagaaatgccatcttccttgatgttggaggtacctgctctggcagatttcaaccgggcttggacagaacttaccgactggctttctctgcttgatcaagttataaaatcacagagggtgatggtgggtgaccttgaggatatcaacgagatgatcatcaagcagaaggcaacaatgcaggatttggaacagaggcgtccccagttggaagaactcattaccgctgcccaaaatttgaaaaacaagaccagcaatcaagaggctagaacaatcattacggatcgaattgaaagaattcagaatcagtgggatgaagtacaagaacaccttcagaaccggaggcaacagttgaatgaaatgttaaaggattcaacacaatggctggaagctaaggaagaagctgagcaggtcttaggacaggccagagccaagcttgagtcatggaaggagggtccctatacagtagatgcaatccaaaagaaaatcacagaaaccaagcagttggccaaagacctccgccagtggcagacaaatgtagatgtggcaaatgacttggccctgaaacttctccgggattattctgcagatgataccagaaaagtccacatgataacagagaatatcaatgcctcttggagaagcattcataaaagggtgagtgagcgagaggctgctttggaagaaactcatagattactgcaacagttccccctggacctggaaaagtttcttgcctggcttacagaagctgaaacaactgccaatgtcctacaggatgctacccgtaaggaaaggctcctagaagactccaagggagtaaaagagctgatgaaacaatggcaagacctccaaggtgaaattgaagctcacacagatgtttatcacaacctggatgaaaacagccaaaaaatcctgagatccctggaaggttccgatgatgcagtcctgttacaaagacgtttggataacatgaacttcaagtggagtgaacttcggaaaaagtctctcaacattaggtcccatttggaagccagttctgaccagtggaagcgtctgcacctttctctgcaggaacttctggtgtggctacagctgaaagatgatgaattaagccggcaggcacctattggaggcgactttccagcagttcagaagcagaacgatgtacatagggccttcaagagggaattgaaaactaaagaacctgtaatcatgagtactcttgagactgtacgaatatttctgacagagcagcctttggaaggactagagaaactctaccaggagcccagagagctgcctcctgaggagagagcccagaatgtcactcggcttctacgaaagcaggctgaggaggtcaatactgagtgggaaaaattgaacctgcactccgctgactggcagagaaaaatagatgagacccttgaaagactccgggaacttcaagaggccacggatgagctggacctcaagctgcgccaagctgaggtgatcaagggatcctggcagcccgtgggcgatctcctcattgactctctccaagatcacctcgagaaagtcaaggcacttcgaggagaaattgcgcctctgaaagagaacgtgagccacgtcaatgaccttgctcgccagcttaccactttgggcattcagctctcaccgtataacctcagcactctggaagacctgaacaccagatggaagcttctgcaggtggccgtcgaggaccgagtcaggcagctgcatgaagcccacagggactttggtccagcatctcagcactttctttccacgtctgtccagggtccctgggagagagccatctcgccaaacaaagtgccctactatatcaaccacgagactcaaacaacttgctgggaccatcccaaaatgacagagctctaccagtctttagctgacctgaataatgtcagattctcagcttataggactgccatgaaactccgaagactgcagaaggccctttgcttggatctcttgagcctgtcagctgcatgtgatgccttggaccagcacaacctcaagcaaaatgaccagcccatggatatcctgcagattattaattgtttgaccactatttatgaccgcctggagcaagagcacaacaatttggtcaacgtccctctctgcgtggatatgtgtctgaactggctgctgaatgtttatgatacgggacgaacagggaggatccgtgtcctgtcttttaaaactggcatcatttccctgtgtaaagcacatttggaagacaagtacagataccttttcaagcaagtggcaagttcaacaggattttgtgaccagcgcaggctgggcctccttctgcatgattctatccaaattccaagacagttgggtgaagttgcatcctttgggggcagtaacattgagccaagtgtccggagctgcttccaatttgctaataataagccagagatcgaagcggccctcttcctagactggatgagactggaaccccagtccatggtgtggctgcccgtcctgcacagagtggctgctgcagaaactgccaagcatcaggccaaatgtaacatctgcaaagagtgtccaatcattggattcaggtacaggagtctaaagcactttaattatgacatctgccaaagctgctttttttctggtcgagttgcaaaaggccataaaatgcactatcccatggtggaatattgcactccgactacatcaggagaagatgttcgagactttgccaaggtactaaaaaacaaatttcgaaccaaaaggtattttgcgaagcatccccgaatgggctacctgccagtgcagactgtcttagagggggacaacatggaaacgcctgcctcgtcccctcagctttcacacgatgatactcattcacgcattgaacattatgctagcaggctagcagaaatggaaaacagcaatggatcttatctaaatgatagcatctctcctaatgagagcatagatgatgaacatttgttaatccagcattactgccaaagtttgaaccaggactcccccctgagccagcctcgtagtcctgcccagatcttgatttccttagagagtgaggaaagaggggagctagagagaatcctagcagatcttgaggaagaaaacaggaatctgcaagcagaatatgaccgtctaaagcagcagcacgaacataaaggcctgtccccactgccgtcccctcctgaaatgatgcccacctctccccagagtccccgggatgctgagctcattgctgaggccaagctactgcgtcaacacaaaggccgcctggaagccaggatgcaaatcctggaagaccacaataaacagctggagtcacagttacacaggctaaggcagctgctggagcaaccccaggcagaggccaaagtgaatggcacaacggtgtcctctccttctacctctctacagaggtccgacagcagtcagcctatgctgctccgagtggttggcagtcaaacttcggactccatgggtgaggaagatcttctcagtcctccccaggacacaagcacagggttagaggaggtgatggagcaactcaacaactccttccctagttcaagaggacacaatgtaggaagtcttttccacatggcagatgatttgggcagagcgatggagtccttagtatcagtcatgacagatgaagaaggagcagaataaatgttttacaactcctgattcccgcatggtttttataatattcatacaacaaagaggattagacagtaagagtttacaagaaataaatctatatttttgtgaagggtagtggtattatactgtagatttcagtagtttctaagtctgttattgttttgttaacaatggcaggttttacacgtctatgcaattgtacaaaaaagttataagaaaactacatgtaaaatcttgatagctaaataacttgccatttctttatatggaacgcattttgggttgtttaaaaatttataacagttataaagaaagattgtaaactaaagtgtgctttataaaaaaaagttgtttataaaaacccctaaaaacaaaacaaacacacacacacacacatacacacacacacacaaaactttgaggcagcgcattgttttgcatccttttggcgtgatatccatatgaaattcatggctttttctttttttgcatattaaagataagacttcctctaccaccacaccaaatgactactacacactgctcatttgagaactgtcagctgagtggggcaggcttgagttttcatttcatatatctatatgtctataagtatataaatactatagttatatagataaagagatacgaatttctatagactgactttttccattttttaaatgttcatgtcacatcctaatagaaagaaattacttctagtcagtcatccaggcttacctgcttggtctagaatggatttttcccggagccggaagccaggaggaaactacaccacactaaaacattgtctacagctccagatgtttctcattttaaacaactttccactgacaacgaaagtaaagtaaagtattggatttttttaaagggaacatgtgaatgaatacacaggacttattatatcagagtgagtaatcggttggttggttgattgattgattgattgatacattcagcttcctgctgctagcaatgccacgatttagatttaatgatgcttcagtggaaatcaatcagaaggtattctgaccttgtgaacatcagaaggtattttttaactcccaagcagtagcaggacgatgatagggctggagggctatggattcccagcccatccctgtgaaggagtaggccactctttaagtgaaggattggatgattgttcataatacataaagttctctgtaattacaactaaattattatgccctcttctcacagtcaaaaggaactgggtggtttggtttttgttgcttttttagatttattgtcccatgtgggatgagtttttaaatgccacaagacataatttaaaataaataaactttgggaaaaggtgtaaaacagtagccccatcacatttgtgatactgacaggtatcaacccagaagcccatgaactgtgtttccatcctttgcatttctctgcgagtagttccacacaggtttgtaagtaagtaagaaagaaggcaaattgattcaaatgttacaaaaaaacccttcttggtggattagacaggttaaatatataaacaaacaaacaaaaattgctcaaaaaagaggagaaaagctcaagaggaaaagctaaggactggtaggaaaaagctttactctttcatgccattttatttctttttgatttttaaatcattcattcaatagataccaccgtgtgacctataattttgcaaatctgttacctctgacatcaagtgtaattagcttttggagagtgggctgacatcaagtgtaattagcttttggagagtgggttttgtccattattaataattaattaattaacatcaaacacggcttctcatgctatttctacctcactttggttttggggtgttcctgataattgtgcacacctgagttcacagcttcaccacttgtccattgcgttattttctttttcctttataattctttctttttccttcataattttcaaaagaaaacccaaagctctaaggtaacaaattaccaaattacatgaagatttggtttttgtcttgcatttttttcctttatgtgacgctggaccttttctttacccaaggatttttaaaactcagatttaaaacaaggggttactttacatcctactaagaagtttaagtaagtaagtttcattctaaaatcagaggtaaatagagtgcataaataattttgttttaatctttttgtttttcttttagacacattagctctggagtgagtctgtcataatatttgaacaaaaattgagagctttattgctgcattttaagcataattaatttggacattatttcgtgttgtgttctttataaccaccaagtattaaactgtaaatcataatgtaactgaagcataaacatcacatggcatgttttgtcattgttttcaggtactgagttcttacttgagtatcataatatattgtgttttaacaccaacactgtaacatttacgaattatttttttaaacttcagttttactgcattttcacaacatatcagacttcaccaaatatatgccttactattgtattatagtactgctttactgtgtatctcaataaagcacgcagttatgttacaaaaaa

SEQ ID NO: 452 - DNA, 13953 bp, Homo sapiens
  source 1..13953: mol_type = genomic DNA
atcagttactgtgttgactcactcagtgttgggatcactcactttccccctacaggactcagatctgggaggcaattaccttcggagaaaaacgaataggaaaaactgaagtgttactttttttaaagctgctgaagtttgttggtttctcattgtttttaagcctactggagcaataaagtttgaagaacttttaccaggttttttttatcgctgccttgatatacacttttcaaaatgctttggtgggaagaagtagaggactgttatgaaagagaagatgttcaaaagaaaacattcacaaaatgggtaaatgcacaattttctaagtttgggaagcagcatattgagaacctcttcagtgacctacaggatgggaggcgcctcctagacctcctcgaaggcctgacagggcaaaaactgccaaaagaaaaaggatccacaagagttcatgccctgaacaatgtcaacaaggcactgcgggttttgcagaacaataatgttgatttagtgaatattggaagtactgacatcgtagatggaaatcataaactgactcttggtttgatttggaatataatcctccactggcaggtcaaaaatgtaatgaaaaatatcatggctggattgcaacaaaccaacagtgaaaagattctcctgagctgggtccgacaatcaactcgtaattatccacaggttaatgtaatcaacttcaccaccagctggtctgatggcctggctttgaatgctctcatccatagtcataggccagacctatttgactggaatagtgtggtttgccagcagtcagccacacaacgactggaacatgcattcaacatcgccagatatcaattaggcatagagaaactactcgatcctgaagatgttgataccacctatccagataagaagtccatcttaatgtacatcacatcactcttccaagttttgcctcaacaagtgagcattgaagccatccaggaagtggaaatgttgccaaggccacctaaagtgactaaagaagaacattttcagttacatcatcaaatgcactattctcaacagatcacggtcagtctagcacagggatatgagagaacttcttcccctaagcctcgattcaagagctatgcctacacacaggctgcttatgtcaccacctctgaccctacacggagcccatttccttcacagcatttggaagctcctgaagacaagtcatttggcagttcattgatggagagtgaagtaaacctggaccgttatcaaacagctttagaagaagtattatcgtggcttctttctgctgaggacacattgcaagcacaaggagagatttctaatgatgtggaagtggtgaaagaccagtttcatactcatgaggggtacatgatggatttgacagcccatcagggccgggttggtaatattctacaattgggaagtaagctgattggaacaggaaaattatcagaagatgaagaaactgaagtacaagagcagatgaatctcctaaattcaagatgggaatgcctcagggtagctagcatggaaaaacaaagcaatttacatagagttttaatggatctccagaatcagaaactgaaagagttgaatgactggctaacaaaaacagaagaaagaacaaggaaaatggaggaagagcctcttggacctgatcttgaagacctaaaacgccaagtacaacaacataaggtgcttcaagaagatctagaacaagaacaagtcagggtcaattctctcactcacatggtggtggtagttgatgaatctagtggagatcacgcaactgctgctttggaagaacaacttaaggtattgggagatcgatgggcaaacatctgtagatggacagaagaccgctgggttcttttacaagacatccttctcaaatggcaacgtcttactgaagaacagtgcctttttagtgcatggctttcagaaaaagaagatgcagtgaacaagattcacacaactggctttaaagatcaaaatgaaatgttatcaagtcttcaaaaactggccgttttaaaagcggatctagaaaagaaaaagcaatccatgggcaaactgtattcactcaaacaagatcttctttcaacactgaagaataagtcagtgacccagaagacggaagcatggctggataactttgcccggtgttgggataatttagtccaaaaacttgaaaagagtacagcacagatttcacaggctgtcaccaccactcagccatcactaacacagacaactgtaatggaaacagtaactacggtgaccacaagggaacagatcctggtaaagcatgctcaagaggaacttccaccaccacctccccaaaagaagaggcagattactgtggattctgaaattaggaaaaggttggatgttgatataactgaacttcacagctggattactcgctcagaagctgtgttgcagagtcctgaatttgcaatctttcggaaggaaggcaacttctcagacttaaaagaaaaagtcaatgccatagagcgagaaaaagctgagaagttcagaaaactgcaagatgccagcagatcagctcaggccctggtggaacagatggtgaatgagggtgttaatgcagatagcatcaaacaagcctcagaacaactgaacagccggtggatcgaattctgccagttgctaagtgagagacttaactggctggagtatcagaacaacatcatcgctttctataatcagctacaacaattggagcagatgacaactactgctgaaaactggttgaaaatccaacccaccaccccatcagagccaacagcaattaaaagtcagttaaaaatttgtaaggatgaagtcaaccggctatcagatcttcaacctcaaattgaacgattaaaaattcaaagcatagccctgaaagagaaaggacaaggacccatgttcctggatgcagactttgtggcctttacaaatcattttaagcaagtcttttctgatgtgcaggccagagagaaagagctacagacaatttttgacactttgccaccaatgcgctatcaggagaccatgagtgccatcaggacatgggtccagcagtcagaaaccaaactctccatacctcaacttagtgtcaccgactatgaaatcatggagcagagactcggggaattgcaggctttacaaagttctctgcaagagcaacaaagtggcctatactatctcagcaccactgtgaaagagatgtcgaagaaagcgccctctgaaattagccggaaatatcaatcagaatttgaagaaattgagggacgctggaagaagctctcctcccagctggttgagcattgtcaaaagctagaggagcaaatgaataaactccgaaaaattcagaatcacatacaaaccctgaagaaatggatggctgaagttgatgtttttctgaaggaggaatggcctgcccttggggattcagaaattctaaaaaagcagctgaaacagtgcagacttttagtcagtgatattcagacaattcagcccagtctaaacagtgtcaatgaaggtgggcagaagataaagaatgaagcagagccagagtttgcttcgagacttgagacagaactcaaagaacttaacactcagtgggatcacatgtgccaacaggtctatgccagaaaggaggccttgaagggaggtttggagaaaactgtaagcctccagaaagatctatcagagatgcacgaatggatgacacaagctgaagaagagtatcttgagagagattttgaatataaaactccagatgaattacagaaagcagttgaagagatgaagagagctaaagaagaggcccaacaaaaagaagcgaaagtgaaactccttactgagtctgtaaatagtgtcatagctcaagctccacctgtagcacaagaggccttaaaaaaggaacttgaaactctaaccaccaactaccagtggctctgcactaggctgaatgggaaatgcaagactttggaagaagtttgggcatgttggcatgagttattgtcatacttggagaaagcaaacaagtggctaaatgaagtagaatttaaacttaaaaccactgaaaacattcctggcggagctgaggaaatctctgaggtgctagattcacttgaaaatttgatgcgacattcagaggataacccaaatcagattcgcatattggcacagaccctaacagatggcggagtcatggatgagctaatcaatgaggaacttgagacatttaattctcgttggagggaactacatgaagaggctgtaaggaggcaaaagttgcttgaacagagcatccagtctgcccaggagactgaaaaatccttacacttaatccaggagtccctcacattcattgacaagcagttggcagcttatattgcagacaaggtggacgcagctcaaatgcctcaggaagcccagaaaatccaatctgatttgacaagtcatgagatcagtttagaagaaatgaagaaacataatcaggggaaggaggctgcccaaagagtcctgtctcagattgatgttgcacagaaaaaattacaagatgtctccatgaagtttcgattattccagaaaccagccaattttgagcagcgtctacaagaaagtaagatgattttagatgaagtgaagatgcacttgcctgcattggaaacaaagagtgtggaacaggaagtagtacagtcacagctaaatcattgtgtgaacttgtataaaagtctgagtgaagtgaagtctgaagtggaaatggtgataaagactggacgtcagattgtacagaaaaagcagacggaaaatcccaaagaacttgatgaaagagtaacagctttgaaattgcattataatgagctgggagcaaaggtaacagaaagaaagcaacagttggagaaatgcttgaaattgtcccgtaagatgcgaaaggaaatgaatgtcttgacagaatggctggcagctacagatatggaattgacaaagagatcagcagttgaaggaatgcctagtaatttggattctgaagttgcctggggaaaggctactcaaaaagagattgagaaacagaaggtgcacctgaagagtatcacagaggtaggagaggccttgaaaacagttttgggcaagaaggagacgttggtggaagataaactcagtcttctgaatagtaactggatagctgtcacctcccgagcagaagagtggttaaatcttttgttggaataccagaaacacatggaaacttttgaccagaatgtggaccacatcacaaagtggatcattcaggctgacacacttttggatgaatcagagaaaaagaaaccccagcaaaaagaagacgtgcttaagcgtttaaaggcagaactgaatgacatacgcccaaaggtggactctacacgtgaccaagcagcaaacttgatggcaaaccgcggtgaccactgcaggaaattagtagagccccaaatctcagagctcaaccatcgatttgcagccatttcacacagaattaagactggaaaggcctccattcctttgaaggaattggagcagtttaactcagatatacaaaaattgcttgaaccactggaggctgaaattcagcagggggtgaatctgaaagaggaagacttcaataaagatatgaatgaagacaatgagggtactgtaaaagaattgttgcaaagaggagacaacttacaacaaagaatcacagatgagagaaagcgagaggaaataaagataaaacagcagctgttacagacaaaacataatgctctcaaggatttgaggtctcaaagaagaaaaaaggctctagaaatttctcatcagtggtatcagtacaagaggcaggctgatgatctcctgaaatgcttggatgacattgaaaaaaaattagccagcctacctgagcccagagatgaaaggaaaataaaggaaattgatcgggaattgcagaagaagaaagaggagctgaatgcagtgcgtaggcaagctgagggcttgtctgaggatggggccgcaatggcagtggagccaactcagatccagctcagcaagcgctggcgggaaattgagagcaaatttgctcagtttcgaagactcaactttgcacaaattcacactgtccgtgaagaaacgatgatggtgatgactgaagacatgcctttggaaatttcttatgtgccttctacttatttgactgaaatcactcatgtctcacaagccctattagaagtggaacaacttctcaatgctcctgacctctgtgctaaggactttgaagatctctttaagcaagaggagtctctgaagaatataaaagatagtctacaacaaagctcaggtcggattgacattattcatagcaagaagacagcagcattgcaaagtgcaacgcctgtggaaagggtgaagctacaggaagctctctcccagcttgatttccaatgggaaaaagttaacaaaatgtacaaggaccgacaagggcgatttgacagatctgttgagaaatggcggcgttttcattatgatataaagatatttaatcagtggctaacagaagctgaacagtttctcagaaagacacaaattcctgagaattgggaacatgctaaatacaaatggtatcttaaggaactccaggatggcattgggcagcggcaaactgttgtcagaacattgaatgcaactggggaagaaataattcagcaatcctcaaaaacagatgccagtattctacaggaaaaattgggaagcctgaatctgcggtggcaggaggtctgcaaacagctgtcagacagaaaaaagaggctagaagaacaaaagaatatcttgtcagaatttcaaagagatttaaatgaatttgttttatggttggaggaagcagataacattgctagtatcccacttgaacctggaaaagagcagcaactaaaagaaaagcttgagcaagtcaagttactggtggaagagttgcccctgcgccagggaattctcaaacaattaaatgaaactggaggacccgtgcttgtaagtgctcccataagcccagaagagcaagataaacttgaaaataagctcaagcagacaaatctccagtggataaaggtttccagagctttacctgagaaacaaggagaaattgaagctcaaataaaagaccttgggcagcttgaaaaaaagcttgaagaccttgaagagcagttaaatcatctgctgctgtggttatctcctattaggaatcagttggaaatttataaccaaccaaaccaagaaggaccatttgacgttaaggaaactgaaatagcagttcaagctaaacaaccggatgtggaagagattttgtctaaagggcagcatttgtacaaggaaaaaccagccactcagccagtgaagaggaagttagaagatctgagctctgagtggaaggcggtaaaccgtttacttcaagagctgagggcaaagcagcctgacctagctcctggactgaccactattggagcctctcctactcagactgttactctggtgacacaacctgtggttactaaggaaactgccatctccaaactagaaatgccatcttccttgatgttggaggtacctgctctggcagatttcaaccgggcttggacagaacttaccgactggctttctctgcttgatcaagttataaaatcacagagggtgatggtgggtgaccttgaggatatcaacgagatgatcatcaagcagaaggcaacaatgcaggatttggaacagaggcgtccccagttggaagaactcattaccgctgcccaaaatttgaaaaacaagaccagcaatcaagaggctagaacaatcattacggatcgaattgaaagaattcagaatcagtgggatgaagtacaagaacaccttcagaaccggaggcaacagttgaatgaaatgttaaaggattcaacacaatggctggaagctaaggaagaagctgagcaggtcttaggacaggccagagccaagcttgagtcatggaaggagggtccctatacagtagatgcaatccaaaagaaaatcacagaaaccaagcagttggccaaagacctccgccagtggcagacaaatgtagatgtggcaaatgacttggccctgaaacttctccgggattattctgcagatgataccagaaaagtccacatgataacagagaatatcaatgcctcttggagaagcattcataaaagggtgagtgagcgagaggctgctttggaagaaactcatagattactgcaacagttccccctggacctggaaaagtttcttgcctggcttacagaagctgaaacaactgccaatgtcctacaggatgctacccgtaaggaaaggctcctagaagactccaagggagtaaaagagctgatgaaacaatggcaagacctccaaggtgaaattgaagctcacacagatgtttatcacaacctggatgaaaacagccaaaaaatcctgagatccctggaaggttccgatgatgcagtcctgttacaaagacgtttggataacatgaacttcaagtggagtgaacttcggaaaaagtctctcaacattaggtcccatttggaagccagttctgaccagtggaagcgtctgcacctttctctgcaggaacttctggtgtggctacagctgaaagatgatgaattaagccggcaggcacctattggaggcgactttccagcagttcagaagcagaacgatgtacatagggccttcaagagggaattgaaaactaaagaacctgtaatcatgagtactcttgagactgtacgaatatttctgacagagcagcctttggaaggactagagaaactctaccaggagcccagagagctgcctcctgaggagagagcccagaatgtcactcggcttctacgaaagcaggctgaggaggtcaatactgagtgggaaaaattgaacctgcactccgctgactggcagagaaaaatagatgagacccttgaaagactccgggaacttcaagaggccacggatgagctggacctcaagctgcgccaagctgaggtgatcaagggatcctggcagcccgtgggcgatctcctcattgactctctccaagatcacctcgagaaagtcaaggcacttcgaggagaaattgcgcctctgaaagagaacgtgagccacgtcaatgaccttgctcgccagcttaccactttgggcattcagctctcaccgtataacctcagcactctggaagacctgaacaccagatggaagcttctgcaggtggccgtcgaggaccgagtcaggcagctgcatgaagcccacagggactttggtccagcatctcagcactttctttccacgtctgtccagggtccctgggagagagccatctcgccaaacaaagtgccctactatatcaaccacgagactcaaacaacttgctgggaccatcccaaaatgacagagctctaccagtctttagctgacctgaataatgtcagattctcagcttataggactgccatgaaactccgaagactgcagaaggccctttgcttggatctcttgagcctgtcagctgcatgtgatgccttggaccagcacaacctcaagcaaaatgaccagcccatggatatcctgcagattattaattgtttgaccactatttatgaccgcctggagcaagagcacaacaatttggtcaacgtccctctctgcgtggatatgtgtctgaactggctgctgaatgtttatgatacgggacgaacagggaggatccgtgtcctgtcttttaaaactggcatcatttccctgtgtaaagcacatttggaagacaagtacagataccttttcaagcaagtggcaagttcaacaggattttgtgaccagcgcaggctgggcctccttctgcatgattctatccaaattccaagacagttgggtgaagttgcatcctttgggggcagtaacattgagccaagtgtccggagctgcttccaatttgctaataataagccagagatcgaagcggccctcttcctagactggatgagactggaaccccagtccatggtgtggctgcccgtcctgcacagagtggctgctgcagaaactgccaagcatcaggccaaatgtaacatctgcaaagagtgtccaatcattggattcaggtacaggagtctaaagcactttaattatgacatctgccaaagctgctttttttctggtcgagttgcaaaaggccataaaatgcactatcccatggtggaatattgcactccgactacatcaggagaagatgttcgagactttgccaaggtactaaaaaacaaatttcgaaccaaaaggtattttgcgaagcatccccgaatgggctacctgccagtgcagactgtcttagagggggacaacatggaaacgcctgcctcgtcccctcagctttcacacgatgatactcattcacgcattgaacattatgctagcaggctagcagaaatggaaaacagcaatggatcttatctaaatgatagcatctctcctaatgagagcatagatgatgaacatttgttaatccagcattactgccaaagtttgaaccaggactcccccctgagccagcctcgtagtcctgcccagatcttgatttccttagagagtgaggaaagaggggagctagagagaatcctagcagatcttgaggaagaaaacaggaatctgcaagcagaatatgaccgtctaaagcagcagcacgaacataaaggcctgtccccactgccgtcccctcctgaaatgatgcccacctctccccagagtccccgggatgctgagctcattgctgaggccaagctactgcgtcaacacaaaggccgcctggaagccaggatgcaaatcctggaagaccacaataaacagctggagtcacagttacacaggctaaggcagctgctggagcaaccccaggcagaggccaaagtgaatggcacaacggtgtcctctccttctacctctctacagaggtccgacagcagtcagcctatgctgctccgagtggttggcagtcaaacttcggactccatgggtgaggaagatcttctcagtcctccccaggacacaagcacagggttagaggaggtgatggagcaactcaacaactccttccctagttcaagaggaagaaatacccctggaaagccaatgagagaggacacaatgtaggaagtcttttccacatggcagatgatttgggcagagcgatggagtccttagtatcagtcatgacagatgaagaaggagcagaataaatgttttacaactcctgattcccgcatggtttttataatattcatacaacaaagaggattagacagtaagagtttacaagaaataaatctatatttttgtgaagggtagtggtattatactgtagatttcagtagtttctaagtctgttattgttttgttaacaatggcaggttttacacgtctatgcaattgtacaaaaaagttataagaaaactacatgtaaaatcttgatagctaaataacttgccatttctttatatggaacgcattttgggttgtttaaaaatttataacagttataaagaaagattgtaaactaaagtgtgctttataaaaaaaagttgtttataaaaacccctaaaaacaaaacaaacacacacacacacacatacacacacacacacaaaactttgaggcagcgcattgttttgcatccttttggcgtgatatccatatgaaattcatggctttttctttttttgcatattaaagataagacttcctctaccaccacaccaaatgactactacacactgctcatttgagaactgtcagctgagtggggcaggcttgagttttcatttcatatatctatatgtctataagtatataaatactatagttatatagataaagagatacgaatttctatagactgactttttccattttttaaatgttcatgtcacatcctaatagaaagaaattacttctagtcagtcatccaggcttacctgcttggtctagaatggatttttcccggagccggaagccaggaggaaactacaccacactaaaacattgtctacagctccagatgtttctcattttaaacaactttccactgacaacgaaagtaaagtaaagtattggatttttttaaagggaacatgtgaatgaatacacaggacttattatatcagagtgagtaatcggttggttggttgattgattgattgattgatacattcagcttcctgctgctagcaatgccacgatttagatttaatgatgcttcagtggaaatcaatcagaaggtattctgaccttgtgaacatcagaaggtattttttaactcccaagcagtagcaggacgatgatagggctggagggctatggattcccagcccatccctgtgaaggagtaggccactctttaagtgaaggattggatgattgttcataatacataaagttctctgtaattacaactaaattattatgccctcttctcacagtcaaaaggaactgggtggtttggtttttgttgcttttttagatttattgtcccatgtgggatgagtttttaaatgccacaagacataatttaaaataaataaactttgggaaaaggtgtaaaacagtagccccatcacatttgtgatactgacaggtatcaacccagaagcccatgaactgtgtttccatcctttgcatttctctgcgagtagttccacacaggtttgtaagtaagtaagaaagaaggcaaattgattcaaatgttacaaaaaaacccttcttggtggattagacaggttaaatatataaacaaacaaacaaaaattgctcaaaaaagaggagaaaagctcaagaggaaaagctaaggactggtaggaaaaagctttactctttcatgccattttatttctttttgatttttaaatcattcattcaatagataccaccgtgtgacctataattttgcaaatctgttacctctgacatcaagtgtaattagcttttggagagtgggctgacatcaagtgtaattagcttttggagagtgggttttgtccattattaataattaattaattaacatcaaacacggcttctcatgctatttctacctcactttggttttggggtgttcctgataattgtgcacacctgagttcacagcttcaccacttgtccattgcgttattttctttttcctttataattctttctttttccttcataattttcaaaagaaaacccaaagctctaaggtaacaaattaccaaattacatgaagatttggtttttgtcttgcatttttttcctttatgtgacgctggaccttttctttacccaaggatttttaaaactcagatttaaaacaaggggttactttacatcctactaagaagtttaagtaagtaagtttcattctaaaatcagaggtaaatagagtgcataaataattttgttttaatctttttgtttttcttttagacacattagctctggagtgagtctgtcataatatttgaacaaaaattgagagctttattgctgcattttaagcataattaatttggacattatttcgtgttgtgttctttataaccaccaagtattaaactgtaaatcataatgtaactgaagcataaacatcacatggcatgttttgtcattgttttcaggtactgagttcttacttgagtatcataatatattgtgttttaacaccaacactgtaacatttacgaattatttttttaaacttcagttttactgcattttcacaacatatcagacttcaccaaatatatgccttactattgtattatagtactgctttactgtgtatctcaataaagcacgcagttatgttacaaaaaa

SEQ ID NO: 453 - DNA, 13960 bp, Homo sapiens
  source 1..13960: mol_type = genomic DNA
atcagttactgtgttgactcactcagtgttgggatcactcactttccccctacaggactcagatctgggaggcaattaccttcggagaaaaacgaataggaaaaactgaagtgttactttttttaaagctgctgaagtttgttggtttctcattgtttttaagcctactggagcaataaagtttgaagaacttttaccaggttttttttatcgctgccttgatatacacttttcaaaatgctttggtgggaagaagtagaggactgttatgaaagagaagatgttcaaaagaaaacattcacaaaatgggtaaatgcacaattttctaagtttgggaagcagcatattgagaacctcttcagtgacctacaggatgggaggcgcctcctagacctcctcgaaggcctgacagggcaaaaactgccaaaagaaaaaggatccacaagagttcatgccctgaacaatgtcaacaaggcactgcgggttttgcagaacaataatgttgatttagtgaatattggaagtactgacatcgtagatggaaatcataaactgactcttggtttgatttggaatataatcctccactggcaggtcaaaaatgtaatgaaaaatatcatggctggattgcaacaaaccaacagtgaaaagattctcctgagctgggtccgacaatcaactcgtaattatccacaggttaatgtaatcaacttcaccaccagctggtctgatggcctggctttgaatgctctcatccatagtcataggccagacctatttgactggaatagtgtggtttgccagcagtcagccacacaacgactggaacatgcattcaacatcgccagatatcaattaggcatagagaaactactcgatcctgaagatgttgataccacctatccagataagaagtccatcttaatgtacatcacatcactcttccaagttttgcctcaacaagtgagcattgaagccatccaggaagtggaaatgttgccaaggccacctaaagtgactaaagaagaacattttcagttacatcatcaaatgcactattctcaacagatcacggtcagtctagcacagggatatgagagaacttcttcccctaagcctcgattcaagagctatgcctacacacaggctgcttatgtcaccacctctgaccctacacggagcccatttccttcacagcatttggaagctcctgaagacaagtcatttggcagttcattgatggagagtgaagtaaacctggaccgttatcaaacagctttagaagaagtattatcgtggcttctttctgctgaggacacattgcaagcacaaggagagatttctaatgatgtggaagtggtgaaagaccagtttcatactcatgaggggtacatgatggatttgacagcccatcagggccgggttggtaatattctacaattgggaagtaagctgattggaacaggaaaattatcagaagatgaagaaactgaagtacaagagcagatgaatctcctaaattcaagatgggaatgcctcagggtagctagcatggaaaaacaaagcaatttacatagagttttaatggatctccagaatcagaaactgaaagagttgaatgactggctaacaaaaacagaagaaagaacaaggaaaatggaggaagagcctcttggacctgatcttgaagacctaaaacgccaagtacaacaacataaggtgcttcaagaagatctagaacaagaacaagtcagggtcaattctctcactcacatggtggtggtagttgatgaatctagtggagatcacgcaactgctgctttggaagaacaacttaaggtattgggagatcgatgggcaaacatctgtagatggacagaagaccgctgggttcttttacaagacatccttctcaaatggcaacgtcttactgaagaacagtgcctttttagtgcatggctttcagaaaaagaagatgcagtgaacaagattcacacaactggctttaaagatcaaaatgaaatgttatcaagtcttcaaaaactggccgttttaaaagcggatctagaaaagaaaaagcaatccatgggcaaactgtattcactcaaacaagatcttctttcaacactgaagaataagtcagtgacccagaagacggaagcatggctggataactttgcccggtgttgggataatttagtccaaaaacttgaaaagagtacagcacagatttcacaggctgtcaccaccactcagccatcactaacacagacaactgtaatggaaacagtaactacggtgaccacaagggaacagatcctggtaaagcatgctcaagaggaacttccaccaccacctccccaaaagaagaggcagattactgtggattctgaaattaggaaaaggttggatgttgatataactgaacttcacagctggattactcgctcagaagctgtgttgcagagtcctgaatttgcaatctttcggaaggaaggcaacttctcagacttaaaagaaaaagtcaatgccatagagcgagaaaaagctgagaagttcagaaaactgcaagatgccagcagatcagctcaggccctggtggaacagatggtgaatgagggtgttaatgcagatagcatcaaacaagcctcagaacaactgaacagccggtggatcgaattctgccagttgctaagtgagagacttaactggctggagtatcagaacaacatcatcgctttctataatcagctacaacaattggagcagatgacaactactgctgaaaactggttgaaaatccaacccaccaccccatcagagccaacagcaattaaaagtcagttaaaaatttgtaaggatgaagtcaaccggctatcagatcttcaacctcaaattgaacgattaaaaattcaaagcatagccctgaaagagaaaggacaaggacccatgttcctggatgcagactttgtggcctttacaaatcattttaagcaagtcttttctgatgtgcaggccagagagaaagagctacagacaatttttgacactttgccaccaatgcgctatcaggagaccatgagtgccatcaggacatgggtccagcagtcagaaaccaaactctccatacctcaacttagtgtcaccgactatgaaatcatggagcagagactcggggaattgcaggctttacaaagttctctgcaagagcaacaaagtggcctatactatctcagcaccactgtgaaagagatgtcgaagaaagcgccctctgaaattagccggaaatatcaatcagaatttgaagaaattgagggacgctggaagaagctctcctcccagctggttgagcattgtcaaaagctagaggagcaaatgaataaactccgaaaaattcagaatcacatacaaaccctgaagaaatggatggctgaagttgatgtttttctgaaggaggaatggcctgcccttggggattcagaaattctaaaaaagcagctgaaacagtgcagacttttagtcagtgatattcagacaattcagcccagtctaaacagtgtcaatgaaggtgggcagaagataaagaatgaagcagagccagagtttgcttcgagacttgagacagaactcaaagaacttaacactcagtgggatcacatgtgccaacaggtctatgccagaaaggaggccttgaagggaggtttggagaaaactgtaagcctccagaaagatctatcagagatgcacgaatggatgacacaagctgaagaagagtatcttgagagagattttgaatataaaactccagatgaattacagaaagcagttgaagagatgaagagagctaaagaagaggcccaacaaaaagaagcgaaagtgaaactccttactgagtctgtaaatagtgtcatagctcaagctccacctgtagcacaagaggccttaaaaaaggaacttgaaactctaaccaccaactaccagtggctctgcactaggctgaatgggaaatgcaagactttggaagaagtttgggcatgttggcatgagttattgtcatacttggagaaagcaaacaagtggctaaatgaagtagaatttaaacttaaaaccactgaaaacattcctggcggagctgaggaaatctctgaggtgctagattcacttgaaaatttgatgcgacattcagaggataacccaaatcagattcgcatattggcacagaccctaacagatggcggagtcatggatgagctaatcaatgaggaacttgagacatttaattctcgttggagggaactacatgaagaggctgtaaggaggcaaaagttgcttgaacagagcatccagtctgcccaggagactgaaaaatccttacacttaatccaggagtccctcacattcattgacaagcagttggcagcttatattgcagacaaggtggacgcagctcaaatgcctcaggaagcccagaaaatccaatctgatttgacaagtcatgagatcagtttagaagaaatgaagaaacataatcaggggaaggaggctgcccaaagagtcctgtctcagattgatgttgcacagaaaaaattacaagatgtctccatgaagtttcgattattccagaaaccagccaattttgagcagcgtctacaagaaagtaagatgattttagatgaagtgaagatgcacttgcctgcattggaaacaaagagtgtggaacaggaagtagtacagtcacagctaaatcattgtgtgaacttgtataaaagtctgagtgaagtgaagtctgaagtggaaatggtgataaagactggacgtcagattgtacagaaaaagcagacggaaaatcccaaagaacttgatgaaagagtaacagctttgaaattgcattataatgagctgggagcaaaggtaacagaaagaaagcaacagttggagaaatgcttgaaattgtcccgtaagatgcgaaaggaaatgaatgtcttgacagaatggctggcagctacagatatggaattgacaaagagatcagcagttgaaggaatgcctagtaatttggattctgaagttgcctggggaaaggctactcaaaaagagattgagaaacagaaggtgcacctgaagagtatcacagaggtaggagaggccttgaaaacagttttgggcaagaaggagacgttggtggaagataaactcagtcttctgaatagtaactggatagctgtcacctcccgagcagaagagtggttaaatcttttgttggaataccagaaacacatggaaacttttgaccagaatgtggaccacatcacaaagtggatcattcaggctgacacacttttggatgaatcagagaaaaagaaaccccagcaaaaagaagacgtgcttaagcgtttaaaggcagaactgaatgacatacgcccaaaggtggactctacacgtgaccaagcagcaaacttgatggcaaaccgcggtgaccactgcaggaaattagtagagccccaaatctcagagctcaaccatcgatttgcagccatttcacacagaattaagactggaaaggcctccattcctttgaaggaattggagcagtttaactcagatatacaaaaattgcttgaaccactggaggctgaaattcagcagggggtgaatctgaaagaggaagacttcaataaagatatgaatgaagacaatgagggtactgtaaaagaattgttgcaaagaggagacaacttacaacaaagaatcacagatgagagaaagcgagaggaaataaagataaaacagcagctgttacagacaaaacataatgctctcaaggatttgaggtctcaaagaagaaaaaaggctctagaaatttctcatcagtggtatcagtacaagaggcaggctgatgatctcctgaaatgcttggatgacattgaaaaaaaattagccagcctacctgagcccagagatgaaaggaaaataaaggaaattgatcgggaattgcagaagaagaaagaggagctgaatgcagtgcgtaggcaagctgagggcttgtctgaggatggggccgcaatggcagtggagccaactcagatccagctcagcaagcgctggcgggaaattgagagcaaatttgctcagtttcgaagactcaactttgcacaaattcacactgtccgtgaagaaacgatgatggtgatgactgaagacatgcctttggaaatttcttatgtgccttctacttatttgactgaaatcactcatgtctcacaagccctattagaagtggaacaacttctcaatgctcctgacctctgtgctaaggactttgaagatctctttaagcaagaggagtctctgaagaatataaaagatagtctacaacaaagctcaggtcggattgacattattcatagcaagaagacagcagcattgcaaagtgcaacgcctgtggaaagggtgaagctacaggaagctctctcccagcttgatttccaatgggaaaaagttaacaaaatgtacaaggaccgacaagggcgatttgacagatctgttgagaaatggcggcgttttcattatgatataaagatatttaatcagtggctaacagaagctgaacagtttctcagaaagacacaaattcctgagaattgggaacatgctaaatacaaatggtatcttaaggaactccaggatggcattgggcagcggcaaactgttgtcagaacattgaatgcaactggggaagaaataattcagcaatcctcaaaaacagatgccagtattctacaggaaaaattgggaagcctgaatctgcggtggcaggaggtctgcaaacagctgtcagacagaaaaaagaggctagaagaacaaaagaatatcttgtcagaatttcaaagagatttaaatgaatttgttttatggttggaggaagcagataacattgctagtatcccacttgaacctggaaaagagcagcaactaaaagaaaagcttgagcaagtcaagttactggtggaagagttgcccctgcgccagggaattctcaaacaattaaatgaaactggaggacccgtgcttgtaagtgctcccataagcccagaagagcaagataaacttgaaaataagctcaagcagacaaatctccagtggataaaggtttccagagctttacctgagaaacaaggagaaattgaagctcaaataaaagaccttgggcagcttgaaaaaaagcttgaagaccttgaagagcagttaaatcatctgctgctgtggttatctcctattaggaatcagttggaaatttataaccaaccaaaccaagaaggaccatttgacgttaaggaaactgaaatagcagttcaagctaaacaaccggatgtggaagagattttgtctaaagggcagcatttgtacaaggaaaaaccagccactcagccagtgaagaggaagttagaagatctgagctctgagtggaaggcggtaaaccgtttacttcaagagctgagggcaaagcagcctgacctagctcctggactgaccactattggagcctctcctactcagactgttactctggtgacacaacctgtggttactaaggaaactgccatctccaaactagaaatgccatcttccttgatgttggaggtacctgctctggcagatttcaaccgggcttggacagaacttaccgactggctttctctgcttgatcaagttataaaatcacagagggtgatggtgggtgaccttgaggatatcaacgagatgatcatcaagcagaaggcaacaatgcaggatttggaacagaggcgtccccagttggaagaactcattaccgctgcccaaaatttgaaaaacaagaccagcaatcaagaggctagaacaatcattacggatcgaattgaaagaattcagaatcagtgggatgaagtacaagaacaccttcagaaccggaggcaacagttgaatgaaatgttaaaggattcaacacaatggctggaagctaaggaagaagctgagcaggtcttaggacaggccagagccaagcttgagtcatggaaggagggtccctatacagtagatgcaatccaaaagaaaatcacagaaaccaagcagttggccaaagacctccgccagtggcagacaaatgtagatgtggcaaatgacttggccctgaaacttctccgggattattctgcagatgataccagaaaagtccacatgataacagagaatatcaatgcctcttggagaagcattcataaaagggtgagtgagcgagaggctgctttggaagaaactcatagattactgcaacagttccccctggacctggaaaagtttcttgcctggcttacagaagctgaaacaactgccaatgtcctacaggatgctacccgtaaggaaaggctcctagaagactccaagggagtaaaagagctgatgaaacaatggcaagacctccaaggtgaaattgaagctcacacagatgtttatcacaacctggatgaaaacagccaaaaaatcctgagatccctggaaggttccgatgatgcagtcctgttacaaagacgtttggataacatgaacttcaagtggagtgaacttcggaaaaagtctctcaacattaggtcccatttggaagccagttctgaccagtggaagcgtctgcacctttctctgcaggaacttctggtgtggctacagctgaaagatgatgaattaagccggcaggcacctattggaggcgactttccagcagttcagaagcagaacgatgtacatagggccttcaagagggaattgaaaactaaagaacctgtaatcatgagtactcttgagactgtacgaatatttctgacagagcagcctttggaaggactagagaaactctaccaggagcccagagagctgcctcctgaggagagagcccagaatgtcactcggcttctacgaaagcaggctgaggaggtcaatactgagtgggaaaaattgaacctgcactccgctgactggcagagaaaaatagatgagacccttgaaagactccgggaacttcaagaggccacggatgagctggacctcaagctgcgccaagctgaggtgatcaagggatcctggcagcccgtgggcgatctcctcattgactctctccaagatcacctcgagaaagtcaaggcacttcgaggagaaattgcgcctctgaaagagaacgtgagccacgtcaatgaccttgctcgccagcttaccactttgggcattcagctctcaccgtataacctcagcactctggaagacctgaacaccagatggaagcttctgcaggtggccgtcgaggaccgagtcaggcagctgcatgaagcccacagggactttggtccagcatctcagcactttctttccacgtctgtccagggtccctgggagagagccatctcgccaaacaaagtgccctactatatcaaccacgagactcaaacaacttgctgggaccatcccaaaatgacagagctctaccagtctttagctgacctgaataatgtcagattctcagcttataggactgccatgaaactccgaagactgcagaaggccctttgcttggatctcttgagcctgtcagctgcatgtgatgccttggaccagcacaacctcaagcaaaatgaccagcccatggatatcctgcagattattaattgtttgaccactatttatgaccgcctggagcaagagcacaacaatttggtcaacgtccctctctgcgtggatatgtgtctgaactggctgctgaatgtttatgatacgggacgaacagggaggatccgtgtcctgtcttttaaaactggcatcatttccctgtgtaaagcacatttggaagacaagtacagataccttttcaagcaagtggcaagttcaacaggattttgtgaccagcgcaggctgggcctccttctgcatgattctatccaaattccaagacagttgggtgaagttgcatcctttgggggcagtaacattgagccaagtgtccggagctgcttccaatttgctaataataagccagagatcgaagcggccctcttcctagactggatgagactggaaccccagtccatggtgtggctgcccgtcctgcacagagtggctgctgcagaaactgccaagcatcaggccaaatgtaacatctgcaaagagtgtccaatcattggattcaggtacaggagtctaaagcactttaattatgacatctgccaaagctgctttttttctggtcgagttgcaaaaggccataaaatgcactatcccatggtggaatattgcactccgactacatcaggagaagatgttcgagactttgccaaggtactaaaaaacaaatttcgaaccaaaaggtattttgcgaagcatccccgaatgggctacctgccagtgcagactgtcttagagggggacaacatggaaactcccgttactctgatcaacttctggccagtagattctgcgcctgcctcgtcccctcagctttcacacgatgatactcattcacgcattgaacattatgctagcaggctagcagaaatggaaaacagcaatggatcttatctaaatgatagcatctctcctaatgagagcatagatgatgaacatttgttaatccagcattactgccaaagtttgaaccaggactcccccctgagccagcctcgtagtcctgcccagatcttgatttccttagagagtgaggaaagaggggagctagagagaatcctagcagatcttgaggaagaaaacaggaatctgcaagcagaatatgaccgtctaaagcagcagcacgaacataaaggcctgtccccactgccgtcccctcctgaaatgatgcccacctctccccagagtccccgggatgctgagctcattgctgaggccaagctactgcgtcaacacaaaggccgcctggaagccaggatgcaaatcctggaagaccacaataaacagctggagtcacagttacacaggctaaggcagctgctggagcaaccccaggcagaggccaaagtgaatggcacaacggtgtcctctccttctacctctctacagaggtccgacagcagtcagcctatgctgctccgagtggttggcagtcaaacttcggactccatgggtgaggaagatcttctcagtcctccccaggacacaagcacagggttagaggaggtgatggagcaactcaacaactccttccctagttcaagaggacacaatgtaggaagtcttttccacatggcagatgatttgggcagagcgatggagtccttagtatcagtcatgacagatgaagaaggagcagaataaatgttttacaactcctgattcccgcatggtttttataatattcatacaacaaagaggattagacagtaagagtttacaagaaataaatctatatttttgtgaagggtagtggtattatactgtagatttcagtagtttctaagtctgttattgttttgttaacaatggcaggttttacacgtctatgcaattgtacaaaaaagttataagaaaactacatgtaaaatcttgatagctaaataacttgccatttctttatatggaacgcattttgggttgtttaaaaatttataacagttataaagaaagattgtaaactaaagtgtgctttataaaaaaaagttgtttataaaaacccctaaaaacaaaacaaacacacacacacacacatacacacacacacacaaaactttgaggcagcgcattgttttgcatccttttggcgtgatatccatatgaaattcatggctttttctttttttgcatattaaagataagacttcctctaccaccacaccaaatgactactacacactgctcatttgagaactgtcagctgagtggggcaggcttgagttttcatttcatatatctatatgtctataagtatataaatactatagttatatagataaagagatacgaatttctatagactgactttttccattttttaaatgttcatgtcacatcctaatagaaagaaattacttctagtcagtcatccaggcttacctgcttggtctagaatggatttttcccggagccggaagccaggaggaaactacaccacactaaaacattgtctacagctccagatgtttctcattttaaacaactttccactgacaacgaaagtaaagtaaagtattggatttttttaaagggaacatgtgaatgaatacacaggacttattatatcagagtgagtaatcggttggttggttgattgattgattgattgatacattcagcttcctgctgctagcaatgccacgatttagatttaatgatgcttcagtggaaatcaatcagaaggtattctgaccttgtgaacatcagaaggtattttttaactcccaagcagtagcaggacgatgatagggctggagggctatggattcccagcccatccctgtgaaggagtaggccactctttaagtgaaggattggatgattgttcataatacataaagttctctgtaattacaactaaattattatgccctcttctcacagtcaaaaggaactgggtggtttggtttttgttgcttttttagatttattgtcccatgtgggatgagtttttaaatgccacaagacataatttaaaataaataaactttgggaaaaggtgtaaaacagtagccccatcacatttgtgatactgacaggtatcaacccagaagcccatgaactgtgtttccatcctttgcatttctctgcgagtagttccacacaggtttgtaagtaagtaagaaagaaggcaaattgattcaaatgttacaaaaaaacccttcttggtggattagacaggttaaatatataaacaaacaaacaaaaattgctcaaaaaagaggagaaaagctcaagaggaaaagctaaggactggtaggaaaaagctttactctttcatgccattttatttctttttgatttttaaatcattcattcaatagataccaccgtgtgacctataattttgcaaatctgttacctctgacatcaagtgtaattagcttttggagagtgggctgacatcaagtgtaattagcttttggagagtgggttttgtccattattaataattaattaattaacatcaaacacggcttctcatgctatttctacctcactttggttttggggtgttcctgataattgtgcacacctgagttcacagcttcaccacttgtccattgcgttattttctttttcctttataattctttctttttccttcataattttcaaaagaaaacccaaagctctaaggtaacaaattaccaaattacatgaagatttggtttttgtcttgcatttttttcctttatgtgacgctggaccttttctttacccaaggatttttaaaactcagatttaaaacaaggggttactttacatcctactaagaagtttaagtaagtaagtttcattctaaaatcagaggtaaatagagtgcataaataattttgttttaatctttttgtttttcttttagacacattagctctggagtgagtctgtcataatatttgaacaaaaattgagagctttattgctgcattttaagcataattaatttggacattatttcgtgttgtgttctttataaccaccaagtattaaactgtaaatcataatgtaactgaagcataaacatcacatggcatgttttgtcattgttttcaggtactgagttcttacttgagtatcataatatattgtgttttaacaccaacactgtaacatttacgaattatttttttaaacttcagttttactgcattttcacaacatatcagacttcaccaaatatatgccttactattgtattatagtactgctttactgtgtatctcaataaagcacgcagttatgttacaaaaaa

SEQ ID NO: 454 - DNA, 13992 bp, Homo sapiens
  source 1..13992: mol_type = genomic DNA
atcagttactgtgttgactcactcagtgttgggatcactcactttccccctacaggactcagatctgggaggcaattaccttcggagaaaaacgaataggaaaaactgaagtgttactttttttaaagctgctgaagtttgttggtttctcattgtttttaagcctactggagcaataaagtttgaagaacttttaccaggttttttttatcgctgccttgatatacacttttcaaaatgctttggtgggaagaagtagaggactgttatgaaagagaagatgttcaaaagaaaacattcacaaaatgggtaaatgcacaattttctaagtttgggaagcagcatattgagaacctcttcagtgacctacaggatgggaggcgcctcctagacctcctcgaaggcctgacagggcaaaaactgccaaaagaaaaaggatccacaagagttcatgccctgaacaatgtcaacaaggcactgcgggttttgcagaacaataatgttgatttagtgaatattggaagtactgacatcgtagatggaaatcataaactgactcttggtttgatttggaatataatcctccactggcaggtcaaaaatgtaatgaaaaatatcatggctggattgcaacaaaccaacagtgaaaagattctcctgagctgggtccgacaatcaactcgtaattatccacaggttaatgtaatcaacttcaccaccagctggtctgatggcctggctttgaatgctctcatccatagtcataggccagacctatttgactggaatagtgtggtttgccagcagtcagccacacaacgactggaacatgcattcaacatcgccagatatcaattaggcatagagaaactactcgatcctgaagatgttgataccacctatccagataagaagtccatcttaatgtacatcacatcactcttccaagttttgcctcaacaagtgagcattgaagccatccaggaagtggaaatgttgccaaggccacctaaagtgactaaagaagaacattttcagttacatcatcaaatgcactattctcaacagatcacggtcagtctagcacagggatatgagagaacttcttcccctaagcctcgattcaagagctatgcctacacacaggctgcttatgtcaccacctctgaccctacacggagcccatttccttcacagcatttggaagctcctgaagacaagtcatttggcagttcattgatggagagtgaagtaaacctggaccgttatcaaacagctttagaagaagtattatcgtggcttctttctgctgaggacacattgcaagcacaaggagagatttctaatgatgtggaagtggtgaaagaccagtttcatactcatgaggggtacatgatggatttgacagcccatcagggccgggttggtaatattctacaattgggaagtaagctgattggaacaggaaaattatcagaagatgaagaaactgaagtacaagagcagatgaatctcctaaattcaagatgggaatgcctcagggtagctagcatggaaaaacaaagcaatttacatagagttttaatggatctccagaatcagaaactgaaagagttgaatgactggctaacaaaaacagaagaaagaacaaggaaaatggaggaagagcctcttggacctgatcttgaagacctaaaacgccaagtacaacaacataaggtgcttcaagaagatctagaacaagaacaagtcagggtcaattctctcactcacatggtggtggtagttgatgaatctagtggagatcacgcaactgctgctttggaagaacaacttaaggtattgggagatcgatgggcaaacatctgtagatggacagaagaccgctgggttcttttacaagacatccttctcaaatggcaacgtcttactgaagaacagtgcctttttagtgcatggctttcagaaaaagaagatgcagtgaacaagattcacacaactggctttaaagatcaaaatgaaatgttatcaagtcttcaaaaactggccgttttaaaagcggatctagaaaagaaaaagcaatccatgggcaaactgtattcactcaaacaagatcttctttcaacactgaagaataagtcagtgacccagaagacggaagcatggctggataactttgcccggtgttgggataatttagtccaaaaacttgaaaagagtacagcacagatttcacaggctgtcaccaccactcagccatcactaacacagacaactgtaatggaaacagtaactacggtgaccacaagggaacagatcctggtaaagcatgctcaagaggaacttccaccaccacctccccaaaagaagaggcagattactgtggattctgaaattaggaaaaggttggatgttgatataactgaacttcacagctggattactcgctcagaagctgtgttgcagagtcctgaatttgcaatctttcggaaggaaggcaacttctcagacttaaaagaaaaagtcaatgccatagagcgagaaaaagctgagaagttcagaaaactgcaagatgccagcagatcagctcaggccctggtggaacagatggtgaatgagggtgttaatgcagatagcatcaaacaagcctcagaacaactgaacagccggtggatcgaattctgccagttgctaagtgagagacttaactggctggagtatcagaacaacatcatcgctttctataatcagctacaacaattggagcagatgacaactactgctgaaaactggttgaaaatccaacccaccaccccatcagagccaacagcaattaaaagtcagttaaaaatttgtaaggatgaagtcaaccggctatcagatcttcaacctcaaattgaacgattaaaaattcaaagcatagccctgaaagagaaaggacaaggacccatgttcctggatgcagactttgtggcctttacaaatcattttaagcaagtcttttctgatgtgcaggccagagagaaagagctacagacaatttttgacactttgccaccaatgcgctatcaggagaccatgagtgccatcaggacatgggtccagcagtcagaaaccaaactctccatacctcaacttagtgtcaccgactatgaaatcatggagcagagactcggggaattgcaggctttacaaagttctctgcaagagcaacaaagtggcctatactatctcagcaccactgtgaaagagatgtcgaagaaagcgccctctgaaattagccggaaatatcaatcagaatttgaagaaattgagggacgctggaagaagctctcctcccagctggttgagcattgtcaaaagctagaggagcaaatgaataaactccgaaaaattcagaatcacatacaaaccctgaagaaatggatggctgaagttgatgtttttctgaaggaggaatggcctgcccttggggattcagaaattctaaaaaagcagctgaaacagtgcagacttttagtcagtgatattcagacaattcagcccagtctaaacagtgtcaatgaaggtgggcagaagataaagaatgaagcagagccagagtttgcttcgagacttgagacagaactcaaagaacttaacactcagtgggatcacatgtgccaacaggtctatgccagaaaggaggccttgaagggaggtttggagaaaactgtaagcctccagaaagatctatcagagatgcacgaatggatgacacaagctgaagaagagtatcttgagagagattttgaatataaaactccagatgaattacagaaagcagttgaagagatgaagagagctaaagaagaggcccaacaaaaagaagcgaaagtgaaactccttactgagtctgtaaatagtgtcatagctcaagctccacctgtagcacaagaggccttaaaaaaggaacttgaaactctaaccaccaactaccagtggctctgcactaggctgaatgggaaatgcaagactttggaagaagtttgggcatgttggcatgagttattgtcatacttggagaaagcaaacaagtggctaaatgaagtagaatttaaacttaaaaccactgaaaacattcctggcggagctgaggaaatctctgaggtgctagattcacttgaaaatttgatgcgacattcagaggataacccaaatcagattcgcatattggcacagaccctaacagatggcggagtcatggatgagctaatcaatgaggaacttgagacatttaattctcgttggagggaactacatgaagaggctgtaaggaggcaaaagttgcttgaacagagcatccagtctgcccaggagactgaaaaatccttacacttaatccaggagtccctcacattcattgacaagcagttggcagcttatattgcagacaaggtggacgcagctcaaatgcctcaggaagcccagaaaatccaatctgatttgacaagtcatgagatcagtttagaagaaatgaagaaacataatcaggggaaggaggctgcccaaagagtcctgtctcagattgatgttgcacagaaaaaattacaagatgtctccatgaagtttcgattattccagaaaccagccaattttgagcagcgtctacaagaaagtaagatgattttagatgaagtgaagatgcacttgcctgcattggaaacaaagagtgtggaacaggaagtagtacagtcacagctaaatcattgtgtgaacttgtataaaagtctgagtgaagtgaagtctgaagtggaaatggtgataaagactggacgtcagattgtacagaaaaagcagacggaaaatcccaaagaacttgatgaaagagtaacagctttgaaattgcattataatgagctgggagcaaaggtaacagaaagaaagcaacagttggagaaatgcttgaaattgtcccgtaagatgcgaaaggaaatgaatgtcttgacagaatggctggcagctacagatatggaattgacaaagagatcagcagttgaaggaatgcctagtaatttggattctgaagttgcctggggaaaggctactcaaaaagagattgagaaacagaaggtgcacctgaagagtatcacagaggtaggagaggccttgaaaacagttttgggcaagaaggagacgttggtggaagataaactcagtcttctgaatagtaactggatagctgtcacctcccgagcagaagagtggttaaatcttttgttggaataccagaaacacatggaaacttttgaccagaatgtggaccacatcacaaagtggatcattcaggctgacacacttttggatgaatcagagaaaaagaaaccccagcaaaaagaagacgtgcttaagcgtttaaaggcagaactgaatgacatacgcccaaaggtggactctacacgtgaccaagcagcaaacttgatggcaaaccgcggtgaccactgcaggaaattagtagagccccaaatctcagagctcaaccatcgatttgcagccatttcacacagaattaagactggaaaggcctccattcctttgaaggaattggagcagtttaactcagatatacaaaaattgcttgaaccactggaggctgaaattcagcagggggtgaatctgaaagaggaagacttcaataaagatatgaatgaagacaatgagggtactgtaaaagaattgttgcaaagaggagacaacttacaacaaagaatcacagatgagagaaagcgagaggaaataaagataaaacagcagctgttacagacaaaacataatgctctcaaggatttgaggtctcaaagaagaaaaaaggctctagaaatttctcatcagtggtatcagtacaagaggcaggctgatgatctcctgaaatgcttggatgacattgaaaaaaaattagccagcctacctgagcccagagatgaaaggaaaataaaggaaattgatcgggaattgcagaagaagaaagaggagctgaatgcagtgcgtaggcaagctgagggcttgtctgaggatggggccgcaatggcagtggagccaactcagatccagctcagcaagcgctggcgggaaattgagagcaaatttgctcagtttcgaagactcaactttgcacaaattcacactgtccgtgaagaaacgatgatggtgatgactgaagacatgcctttggaaatttcttatgtgccttctacttatttgactgaaatcactcatgtctcacaagccctattagaagtggaacaacttctcaatgctcctgacctctgtgctaaggactttgaagatctctttaagcaagaggagtctctgaagaatataaaagatagtctacaacaaagctcaggtcggattgacattattcatagcaagaagacagcagcattgcaaagtgcaacgcctgtggaaagggtgaagctacaggaagctctctcccagcttgatttccaatgggaaaaagttaacaaaatgtacaaggaccgacaagggcgatttgacagatctgttgagaaatggcggcgttttcattatgatataaagatatttaatcagtggctaacagaagctgaacagtttctcagaaagacacaaattcctgagaattgggaacatgctaaatacaaatggtatcttaaggaactccaggatggcattgggcagcggcaaactgttgtcagaacattgaatgcaactggggaagaaataattcagcaatcctcaaaaacagatgccagtattctacaggaaaaattgggaagcctgaatctgcggtggcaggaggtctgcaaacagctgtcagacagaaaaaagaggctagaagaacaaaagaatatcttgtcagaatttcaaagagatttaaatgaatttgttttatggttggaggaagcagataacattgctagtatcccacttgaacctggaaaagagcagcaactaaaagaaaagcttgagcaagtcaagttactggtggaagagttgcccctgcgccagggaattctcaaacaattaaatgaaactggaggacccgtgcttgtaagtgctcccataagcccagaagagcaagataaacttgaaaataagctcaagcagacaaatctccagtggataaaggtttccagagctttacctgagaaacaaggagaaattgaagctcaaataaaagaccttgggcagcttgaaaaaaagcttgaagaccttgaagagcagttaaatcatctgctgctgtggttatctcctattaggaatcagttggaaatttataaccaaccaaaccaagaaggaccatttgacgttaaggaaactgaaatagcagttcaagctaaacaaccggatgtggaagagattttgtctaaagggcagcatttgtacaaggaaaaaccagccactcagccagtgaagaggaagttagaagatctgagctctgagtggaaggcggtaaaccgtttacttcaagagctgagggcaaagcagcctgacctagctcctggactgaccactattggagcctctcctactcagactgttactctggtgacacaacctgtggttactaaggaaactgccatctccaaactagaaatgccatcttccttgatgttggaggtacctgctctggcagatttcaaccgggcttggacagaacttaccgactggctttctctgcttgatcaagttataaaatcacagagggtgatggtgggtgaccttgaggatatcaacgagatgatcatcaagcagaaggcaacaatgcaggatttggaacagaggcgtccccagttggaagaactcattaccgctgcccaaaatttgaaaaacaagaccagcaatcaagaggctagaacaatcattacggatcgaattgaaagaattcagaatcagtgggatgaagtacaagaacaccttcagaaccggaggcaacagttgaatgaaatgttaaaggattcaacacaatggctggaagctaaggaagaagctgagcaggtcttaggacaggccagagccaagcttgagtcatggaaggagggtccctatacagtagatgcaatccaaaagaaaatcacagaaaccaagcagttggccaaagacctccgccagtggcagacaaatgtagatgtggcaaatgacttggccctgaaacttctccgggattattctgcagatgataccagaaaagtccacatgataacagagaatatcaatgcctcttggagaagcattcataaaagggtgagtgagcgagaggctgctttggaagaaactcatagattactgcaacagttccccctggacctggaaaagtttcttgcctggcttacagaagctgaaacaactgccaatgtcctacaggatgctacccgtaaggaaaggctcctagaagactccaagggagtaaaagagctgatgaaacaatggcaagacctccaaggtgaaattgaagctcacacagatgtttatcacaacctggatgaaaacagccaaaaaatcctgagatccctggaaggttccgatgatgcagtcctgttacaaagacgtttggataacatgaacttcaagtggagtgaacttcggaaaaagtctctcaacattaggtcccatttggaagccagttctgaccagtggaagcgtctgcacctttctctgcaggaacttctggtgtggctacagctgaaagatgatgaattaagccggcaggcacctattggaggcgactttccagcagttcagaagcagaacgatgtacatagggccttcaagagggaattgaaaactaaagaacctgtaatcatgagtactcttgagactgtacgaatatttctgacagagcagcctttggaaggactagagaaactctaccaggagcccagagagctgcctcctgaggagagagcccagaatgtcactcggcttctacgaaagcaggctgaggaggtcaatactgagtgggaaaaattgaacctgcactccgctgactggcagagaaaaatagatgagacccttgaaagactccgggaacttcaagaggccacggatgagctggacctcaagctgcgccaagctgaggtgatcaagggatcctggcagcccgtgggcgatctcctcattgactctctccaagatcacctcgagaaagtcaaggcacttcgaggagaaattgcgcctctgaaagagaacgtgagccacgtcaatgaccttgctcgccagcttaccactttgggcattcagctctcaccgtataacctcagcactctggaagacctgaacaccagatggaagcttctgcaggtggccgtcgaggaccgagtcaggcagctgcatgaagcccacagggactttggtccagcatctcagcactttctttccacgtctgtccagggtccctgggagagagccatctcgccaaacaaagtgccctactatatcaaccacgagactcaaacaacttgctgggaccatcccaaaatgacagagctctaccagtctttagctgacctgaataatgtcagattctcagcttataggactgccatgaaactccgaagactgcagaaggccctttgcttggatctcttgagcctgtcagctgcatgtgatgccttggaccagcacaacctcaagcaaaatgaccagcccatggatatcctgcagattattaattgtttgaccactatttatgaccgcctggagcaagagcacaacaatttggtcaacgtccctctctgcgtggatatgtgtctgaactggctgctgaatgtttatgatacgggacgaacagggaggatccgtgtcctgtcttttaaaactggcatcatttccctgtgtaaagcacatttggaagacaagtacagataccttttcaagcaagtggcaagttcaacaggattttgtgaccagcgcaggctgggcctccttctgcatgattctatccaaattccaagacagttgggtgaagttgcatcctttgggggcagtaacattgagccaagtgtccggagctgcttccaatttgctaataataagccagagatcgaagcggccctcttcctagactggatgagactggaaccccagtccatggtgtggctgcccgtcctgcacagagtggctgctgcagaaactgccaagcatcaggccaaatgtaacatctgcaaagagtgtccaatcattggattcaggtacaggagtctaaagcactttaattatgacatctgccaaagctgctttttttctggtcgagttgcaaaaggccataaaatgcactatcccatggtggaatattgcactccgactacatcaggagaagatgttcgagactttgccaaggtactaaaaaacaaatttcgaaccaaaaggtattttgcgaagcatccccgaatgggctacctgccagtgcagactgtcttagagggggacaacatggaaactcccgttactctgatcaacttctggccagtagattctgcgcctgcctcgtcccctcagctttcacacgatgatactcattcacgcattgaacattatgctagcaggctagcagaaatggaaaacagcaatggatcttatctaaatgatagcatctctcctaatgagagcatagatgatgaacatttgttaatccagcattactgccaaagtttgaaccaggactcccccctgagccagcctcgtagtcctgcccagatcttgatttccttagagagtgaggaaagaggggagctagagagaatcctagcagatcttgaggaagaaaacaggaatctgcaagcagaatatgaccgtctaaagcagcagcacgaacataaaggcctgtccccactgccgtcccctcctgaaatgatgcccacctctccccagagtccccgggatgctgagctcattgctgaggccaagctactgcgtcaacacaaaggccgcctggaagccaggatgcaaatcctggaagaccacaataaacagctggagtcacagttacacaggctaaggcagctgctggagcaaccccaggcagaggccaaagtgaatggcacaacggtgtcctctccttctacctctctacagaggtccgacagcagtcagcctatgctgctccgagtggttggcagtcaaacttcggactccatgggtgaggaagatcttctcagtcctccccaggacacaagcacagggttagaggaggtgatggagcaactcaacaactccttccctagttcaagaggaagaaatacccctggaaagccaatgagagaggacacaatgtaggaagtcttttccacatggcagatgatttgggcagagcgatggagtccttagtatcagtcatgacagatgaagaaggagcagaataaatgttttacaactcctgattcccgcatggtttttataatattcatacaacaaagaggattagacagtaagagtttacaagaaataaatctatatttttgtgaagggtagtggtattatactgtagatttcagtagtttctaagtctgttattgttttgttaacaatggcaggttttacacgtctatgcaattgtacaaaaaagttataagaaaactacatgtaaaatcttgatagctaaataacttgccatttctttatatggaacgcattttgggttgtttaaaaatttataacagttataaagaaagattgtaaactaaagtgtgctttataaaaaaaagttgtttataaaaacccctaaaaacaaaacaaacacacacacacacacatacacacacacacacaaaactttgaggcagcgcattgttttgcatccttttggcgtgatatccatatgaaattcatggctttttctttttttgcatattaaagataagacttcctctaccaccacaccaaatgactactacacactgctcatttgagaactgtcagctgagtggggcaggcttgagttttcatttcatatatctatatgtctataagtatataaatactatagttatatagataaagagatacgaatttctatagactgactttttccattttttaaatgttcatgtcacatcctaatagaaagaaattacttctagtcagtcatccaggcttacctgcttggtctagaatggatttttcccggagccggaagccaggaggaaactacaccacactaaaacattgtctacagctccagatgtttctcattttaaacaactttccactgacaacgaaagtaaagtaaagtattggatttttttaaagggaacatgtgaatgaatacacaggacttattatatcagagtgagtaatcggttggttggttgattgattgattgattgatacattcagcttcctgctgctagcaatgccacgatttagatttaatgatgcttcagtggaaatcaatcagaaggtattctgaccttgtgaacatcagaaggtattttttaactcccaagcagtagcaggacgatgatagggctggagggctatggattcccagcccatccctgtgaaggagtaggccactctttaagtgaaggattggatgattgttcataatacataaagttctctgtaattacaactaaattattatgccctcttctcacagtcaaaaggaactgggtggtttggtttttgttgcttttttagatttattgtcccatgtgggatgagtttttaaatgccacaagacataatttaaaataaataaactttgggaaaaggtgtaaaacagtagccccatcacatttgtgatactgacaggtatcaacccagaagcccatgaactgtgtttccatcctttgcatttctctgcgagtagttccacacaggtttgtaagtaagtaagaaagaaggcaaattgattcaaatgttacaaaaaaacccttcttggtggattagacaggttaaatatataaacaaacaaacaaaaattgctcaaaaaagaggagaaaagctcaagaggaaaagctaaggactggtaggaaaaagctttactctttcatgccattttatttctttttgatttttaaatcattcattcaatagataccaccgtgtgacctataattttgcaaatctgttacctctgacatcaagtgtaattagcttttggagagtgggctgacatcaagtgtaattagcttttggagagtgggttttgtccattattaataattaattaattaacatcaaacacggcttctcatgctatttctacctcactttggttttggggtgttcctgataattgtgcacacctgagttcacagcttcaccacttgtccattgcgttattttctttttcctttataattctttctttttccttcataattttcaaaagaaaacccaaagctctaaggtaacaaattaccaaattacatgaagatttggtttttgtcttgcatttttttcctttatgtgacgctggaccttttctttacccaaggatttttaaaactcagatttaaaacaaggggttactttacatcctactaagaagtttaagtaagtaagtttcattctaaaatcagaggtaaatagagtgcataaataattttgttttaatctttttgtttttcttttagacacattagctctggagtgagtctgtcataatatttgaacaaaaattgagagctttattgctgcattttaagcataattaatttggacattatttcgtgttgtgttctttataaccaccaagtattaaactgtaaatcataatgtaactgaagcataaacatcacatggcatgttttgtcattgttttcaggtactgagttcttacttgagtatcataatatattgtgttttaacaccaacactgtaacatttacgaattatttttttaaacttcagttttactgcattttcacaacatatcagacttcaccaaatatatgccttactattgtattatagtactgctttactgtgtatctcaataaagcacgcagttatgttacaaaaaa

SEQ ID NO: 455 - DNA, 9751 bp, Homo sapiens
  source 1..9751: mol_type = genomic DNA
ctgagaaagacagattgcaatgactgagatgattttgctaattttttttccagcctatttccttaatgctgtaaggaggcaaaagttgcttgaacagagcatccagtctgcccaggagactgaaaaatccttacacttaatccaggagtccctcacattcattgacaagcagttggcagcttatattgcagacaaggtggacgcagctcaaatgcctcaggaagcccagaaaatccaatctgatttgacaagtcatgagatcagtttagaagaaatgaagaaacataatcaggggaaggaggctgcccaaagagtcctgtctcagattgatgttgcacagaaaaaattacaagatgtctccatgaagtttcgattattccagaaaccagccaattttgagcagcgtctacaagaaagtaagatgattttagatgaagtgaagatgcacttgcctgcattggaaacaaagagtgtggaacaggaagtagtacagtcacagctaaatcattgtgtgaacttgtataaaagtctgagtgaagtgaagtctgaagtggaaatggtgataaagactggacgtcagattgtacagaaaaagcagacggaaaatcccaaagaacttgatgaaagagtaacagctttgaaattgcattataatgagctgggagcaaaggtaacagaaagaaagcaacagttggagaaatgcttgaaattgtcccgtaagatgcgaaaggaaatgaatgtcttgacagaatggctggcagctacagatatggaattgacaaagagatcagcagttgaaggaatgcctagtaatttggattctgaagttgcctggggaaaggctactcaaaaagagattgagaaacagaaggtgcacctgaagagtatcacagaggtaggagaggccttgaaaacagttttgggcaagaaggagacgttggtggaagataaactcagtcttctgaatagtaactggatagctgtcacctcccgagcagaagagtggttaaatcttttgttggaataccagaaacacatggaaacttttgaccagaatgtggaccacatcacaaagtggatcattcaggctgacacacttttggatgaatcagagaaaaagaaaccccagcaaaaagaagacgtgcttaagcgtttaaaggcagaactgaatgacatacgcccaaaggtggactctacacgtgaccaagcagcaaacttgatggcaaaccgcggtgaccactgcaggaaattagtagagccccaaatctcagagctcaaccatcgatttgcagccatttcacacagaattaagactggaaaggcctccattcctttgaaggaattggagcagtttaactcagatatacaaaaattgcttgaaccactggaggctgaaattcagcagggggtgaatctgaaagaggaagacttcaataaagatatgaatgaagacaatgagggtactgtaaaagaattgttgcaaagaggagacaacttacaacaaagaatcacagatgagagaaagcgagaggaaataaagataaaacagcagctgttacagacaaaacataatgctctcaaggatttgaggtctcaaagaagaaaaaaggctctagaaatttctcatcagtggtatcagtacaagaggcaggctgatgatctcctgaaatgcttggatgacattgaaaaaaaattagccagcctacctgagcccagagatgaaaggaaaataaaggaaattgatcgggaattgcagaagaagaaagaggagctgaatgcagtgcgtaggcaagctgagggcttgtctgaggatggggccgcaatggcagtggagccaactcagatccagctcagcaagcgctggcgggaaattgagagcaaatttgctcagtttcgaagactcaactttgcacaaattcacactgtccgtgaagaaacgatgatggtgatgactgaagacatgcctttggaaatttcttatgtgccttctacttatttgactgaaatcactcatgtctcacaagccctattagaagtggaacaacttctcaatgctcctgacctctgtgctaaggactttgaagatctctttaagcaagaggagtctctgaagaatataaaagatagtctacaacaaagctcaggtcggattgacattattcatagcaagaagacagcagcattgcaaagtgcaacgcctgtggaaagggtgaagctacaggaagctctctcccagcttgatttccaatgggaaaaagttaacaaaatgtacaaggaccgacaagggcgatttgacagatctgttgagaaatggcggcgttttcattatgatataaagatatttaatcagtggctaacagaagctgaacagtttctcagaaagacacaaattcctgagaattgggaacatgctaaatacaaatggtatcttaaggaactccaggatggcattgggcagcggcaaactgttgtcagaacattgaatgcaactggggaagaaataattcagcaatcctcaaaaacagatgccagtattctacaggaaaaattgggaagcctgaatctgcggtggcaggaggtctgcaaacagctgtcagacagaaaaaagaggctagaagaacaaaagaatatcttgtcagaatttcaaagagatttaaatgaatttgttttatggttggaggaagcagataacattgctagtatcccacttgaacctggaaaagagcagcaactaaaagaaaagcttgagcaagtcaagttactggtggaagagttgcccctgcgccagggaattctcaaacaattaaatgaaactggaggacccgtgcttgtaagtgctcccataagcccagaagagcaagataaacttgaaaataagctcaagcagacaaatctccagtggataaaggtttccagagctttacctgagaaacaaggagaaattgaagctcaaataaaagaccttgggcagcttgaaaaaaagcttgaagaccttgaagagcagttaaatcatctgctgctgtggttatctcctattaggaatcagttggaaatttataaccaaccaaaccaagaaggaccatttgacgttaaggaaactgaaatagcagttcaagctaaacaaccggatgtggaagagattttgtctaaagggcagcatttgtacaaggaaaaaccagccactcagccagtgaagaggaagttagaagatctgagctctgagtggaaggcggtaaaccgtttacttcaagagctgagggcaaagcagcctgacctagctcctggactgaccactattggagcctctcctactcagactgttactctggtgacacaacctgtggttactaaggaaactgccatctccaaactagaaatgccatcttccttgatgttggaggtacctgctctggcagatttcaaccgggcttggacagaacttaccgactggctttctctgcttgatcaagttataaaatcacagagggtgatggtgggtgaccttgaggatatcaacgagatgatcatcaagcagaaggcaacaatgcaggatttggaacagaggcgtccccagttggaagaactcattaccgctgcccaaaatttgaaaaacaagaccagcaatcaagaggctagaacaatcattacggatcgaattgaaagaattcagaatcagtgggatgaagtacaagaacaccttcagaaccggaggcaacagttgaatgaaatgttaaaggattcaacacaatggctggaagctaaggaagaagctgagcaggtcttaggacaggccagagccaagcttgagtcatggaaggagggtccctatacagtagatgcaatccaaaagaaaatcacagaaaccaagcagttggccaaagacctccgccagtggcagacaaatgtagatgtggcaaatgacttggccctgaaacttctccgggattattctgcagatgataccagaaaagtccacatgataacagagaatatcaatgcctcttggagaagcattcataaaagggtgagtgagcgagaggctgctttggaagaaactcatagattactgcaacagttccccctggacctggaaaagtttcttgcctggcttacagaagctgaaacaactgccaatgtcctacaggatgctacccgtaaggaaaggctcctagaagactccaagggagtaaaagagctgatgaaacaatggcaagacctccaaggtgaaattgaagctcacacagatgtttatcacaacctggatgaaaacagccaaaaaatcctgagatccctggaaggttccgatgatgcagtcctgttacaaagacgtttggataacatgaacttcaagtggagtgaacttcggaaaaagtctctcaacattaggtcccatttggaagccagttctgaccagtggaagcgtctgcacctttctctgcaggaacttctggtgtggctacagctgaaagatgatgaattaagccggcaggcacctattggaggcgactttccagcagttcagaagcagaacgatgtacatagggccttcaagagggaattgaaaactaaagaacctgtaatcatgagtactcttgagactgtacgaatatttctgacagagcagcctttggaaggactagagaaactctaccaggagcccagagagctgcctcctgaggagagagcccagaatgtcactcggcttctacgaaagcaggctgaggaggtcaatactgagtgggaaaaattgaacctgcactccgctgactggcagagaaaaatagatgagacccttgaaagactccgggaacttcaagaggccacggatgagctggacctcaagctgcgccaagctgaggtgatcaagggatcctggcagcccgtgggcgatctcctcattgactctctccaagatcacctcgagaaagtcaaggcacttcgaggagaaattgcgcctctgaaagagaacgtgagccacgtcaatgaccttgctcgccagcttaccactttgggcattcagctctcaccgtataacctcagcactctggaagacctgaacaccagatggaagcttctgcaggtggccgtcgaggaccgagtcaggcagctgcatgaagcccacagggactttggtccagcatctcagcactttctttccacgtctgtccagggtccctgggagagagccatctcgccaaacaaagtgccctactatatcaaccacgagactcaaacaacttgctgggaccatcccaaaatgacagagctctaccagtctttagctgacctgaataatgtcagattctcagcttataggactgccatgaaactccgaagactgcagaaggccctttgcttggatctcttgagcctgtcagctgcatgtgatgccttggaccagcacaacctcaagcaaaatgaccagcccatggatatcctgcagattattaattgtttgaccactatttatgaccgcctggagcaagagcacaacaatttggtcaacgtccctctctgcgtggatatgtgtctgaactggctgctgaatgtttatgatacgggacgaacagggaggatccgtgtcctgtcttttaaaactggcatcatttccctgtgtaaagcacatttggaagacaagtacagataccttttcaagcaagtggcaagttcaacaggattttgtgaccagcgcaggctgggcctccttctgcatgattctatccaaattccaagacagttgggtgaagttgcatcctttgggggcagtaacattgagccaagtgtccggagctgcttccaatttgctaataataagccagagatcgaagcggccctcttcctagactggatgagactggaaccccagtccatggtgtggctgcccgtcctgcacagagtggctgctgcagaaactgccaagcatcaggccaaatgtaacatctgcaaagagtgtccaatcattggattcaggtacaggagtctaaagcactttaattatgacatctgccaaagctgctttttttctggtcgagttgcaaaaggccataaaatgcactatcccatggtggaatattgcactccgactacatcaggagaagatgttcgagactttgccaaggtactaaaaaacaaatttcgaaccaaaaggtattttgcgaagcatccccgaatgggctacctgccagtgcagactgtcttagagggggacaacatggaaactcccgttactctgatcaacttctggccagtagattctgcgcctgcctcgtcccctcagctttcacacgatgatactcattcacgcattgaacattatgctagcaggctagcagaaatggaaaacagcaatggatcttatctaaatgatagcatctctcctaatgagagcatagatgatgaacatttgttaatccagcattactgccaaagtttgaaccaggactcccccctgagccagcctcgtagtcctgcccagatcttgatttccttagagagtgaggaaagaggggagctagagagaatcctagcagatcttgaggaagaaaacaggaatctgcaagcagaatatgaccgtctaaagcagcagcacgaacataaaggcctgtccccactgccgtcccctcctgaaatgatgcccacctctccccagagtccccgggatgctgagctcattgctgaggccaagctactgcgtcaacacaaaggccgcctggaagccaggatgcaaatcctggaagaccacaataaacagctggagtcacagttacacaggctaaggcagctgctggagcaaccccaggcagaggccaaagtgaatggcacaacggtgtcctctccttctacctctctacagaggtccgacagcagtcagcctatgctgctccgagtggttggcagtcaaacttcggactccatgggtgaggaagatcttctcagtcctccccaggacacaagcacagggttagaggaggtgatggagcaactcaacaactccttccctagttcaagaggaagaaatacccctggaaagccaatgagagaggacacaatgtaggaagtcttttccacatggcagatgatttgggcagagcgatggagtccttagtatcagtcatgacagatgaagaaggagcagaataaatgttttacaactcctgattcccgcatggtttttataatattcatacaacaaagaggattagacagtaagagtttacaagaaataaatctatatttttgtgaagggtagtggtattatactgtagatttcagtagtttctaagtctgttattgttttgttaacaatggcaggttttacacgtctatgcaattgtacaaaaaagttataagaaaactacatgtaaaatcttgatagctaaataacttgccatttctttatatggaacgcattttgggttgtttaaaaatttataacagttataaagaaagattgtaaactaaagtgtgctttataaaaaaaagttgtttataaaaacccctaaaaacaaaacaaacacacacacacacacatacacacacacacacaaaactttgaggcagcgcattgttttgcatccttttggcgtgatatccatatgaaattcatggctttttctttttttgcatattaaagataagacttcctctaccaccacaccaaatgactactacacactgctcatttgagaactgtcagctgagtggggcaggcttgagttttcatttcatatatctatatgtctataagtatataaatactatagttatatagataaagagatacgaatttctatagactgactttttccattttttaaatgttcatgtcacatcctaatagaaagaaattacttctagtcagtcatccaggcttacctgcttggtctagaatggatttttcccggagccggaagccaggaggaaactacaccacactaaaacattgtctacagctccagatgtttctcattttaaacaactttccactgacaacgaaagtaaagtaaagtattggatttttttaaagggaacatgtgaatgaatacacaggacttattatatcagagtgagtaatcggttggttggttgattgattgattgattgatacattcagcttcctgctgctagcaatgccacgatttagatttaatgatgcttcagtggaaatcaatcagaaggtattctgaccttgtgaacatcagaaggtattttttaactcccaagcagtagcaggacgatgatagggctggagggctatggattcccagcccatccctgtgaaggagtaggccactctttaagtgaaggattggatgattgttcataatacataaagttctctgtaattacaactaaattattatgccctcttctcacagtcaaaaggaactgggtggtttggtttttgttgcttttttagatttattgtcccatgtgggatgagtttttaaatgccacaagacataatttaaaataaataaactttgggaaaaggtgtaaaacagtagccccatcacatttgtgatactgacaggtatcaacccagaagcccatgaactgtgtttccatcctttgcatttctctgcgagtagttccacacaggtttgtaagtaagtaagaaagaaggcaaattgattcaaatgttacaaaaaaacccttcttggtggattagacaggttaaatatataaacaaacaaacaaaaattgctcaaaaaagaggagaaaagctcaagaggaaaagctaaggactggtaggaaaaagctttactctttcatgccattttatttctttttgatttttaaatcattcattcaatagataccaccgtgtgacctataattttgcaaatctgttacctctgacatcaagtgtaattagcttttggagagtgggctgacatcaagtgtaattagcttttggagagtgggttttgtccattattaataattaattaattaacatcaaacacggcttctcatgctatttctacctcactttggttttggggtgttcctgataattgtgcacacctgagttcacagcttcaccacttgtccattgcgttattttctttttcctttataattctttctttttccttcataattttcaaaagaaaacccaaagctctaaggtaacaaattaccaaattacatgaagatttggtttttgtcttgcatttttttcctttatgtgacgctggaccttttctttacccaaggatttttaaaactcagatttaaaacaaggggttactttacatcctactaagaagtttaagtaagtaagtttcattctaaaatcagaggtaaatagagtgcataaataattttgttttaatctttttgtttttcttttagacacattagctctggagtgagtctgtcataatatttgaacaaaaattgagagctttattgctgcattttaagcataattaatttggacattatttcgtgttgtgttctttataaccaccaagtattaaactgtaaatcataatgtaactgaagcataaacatcacatggcatgttttgtcattgttttcaggtactgagttcttacttgagtatcataatatattgtgttttaacaccaacactgtaacatttacgaattatttttttaaacttcagttttactgcattttcacaacatatcagacttcaccaaatatatgccttactattgtattatagtactgctttactgtgtatctcaataaagcacgcagttatgttacaaaaaa

SEQ ID NO: 456 - DNA, 9894 bp, Homo sapiens
  source 1..9894: mol_type = genomic DNA
ctgagaaagacagattgcaatgactgagatgattttgctaattttttttccagcctatttccttaatgtacgtgatattgtgattgattttcatgcagagatccctgatcctatagttttgtttgctatttatttttctccttcacattttttttctatcaacagagctgaatgagtgccaggaagctgcgaaatctgtcttacaaaaaggctgtaaggaggcaaaagttgcttgaacagagcatccagtctgcccaggagactgaaaaatccttacacttaatccaggagtccctcacattcattgacaagcagttggcagcttatattgcagacaaggtggacgcagctcaaatgcctcaggaagcccagaaaatccaatctgatttgacaagtcatgagatcagtttagaagaaatgaagaaacataatcaggggaaggaggctgcccaaagagtcctgtctcagattgatgttgcacagaaaaaattacaagatgtctccatgaagtttcgattattccagaaaccagccaattttgagcagcgtctacaagaaagtaagatgattttagatgaagtgaagatgcacttgcctgcattggaaacaaagagtgtggaacaggaagtagtacagtcacagctaaatcattgtgtgaacttgtataaaagtctgagtgaagtgaagtctgaagtggaaatggtgataaagactggacgtcagattgtacagaaaaagcagacggaaaatcccaaagaacttgatgaaagagtaacagctttgaaattgcattataatgagctgggagcaaaggtaacagaaagaaagcaacagttggagaaatgcttgaaattgtcccgtaagatgcgaaaggaaatgaatgtcttgacagaatggctggcagctacagatatggaattgacaaagagatcagcagttgaaggaatgcctagtaatttggattctgaagttgcctggggaaaggctactcaaaaagagattgagaaacagaaggtgcacctgaagagtatcacagaggtaggagaggccttgaaaacagttttgggcaagaaggagacgttggtggaagataaactcagtcttctgaatagtaactggatagctgtcacctcccgagcagaagagtggttaaatcttttgttggaataccagaaacacatggaaacttttgaccagaatgtggaccacatcacaaagtggatcattcaggctgacacacttttggatgaatcagagaaaaagaaaccccagcaaaaagaagacgtgcttaagcgtttaaaggcagaactgaatgacatacgcccaaaggtggactctacacgtgaccaagcagcaaacttgatggcaaaccgcggtgaccactgcaggaaattagtagagccccaaatctcagagctcaaccatcgatttgcagccatttcacacagaattaagactggaaaggcctccattcctttgaaggaattggagcagtttaactcagatatacaaaaattgcttgaaccactggaggctgaaattcagcagggggtgaatctgaaagaggaagacttcaataaagatatgaatgaagacaatgagggtactgtaaaagaattgttgcaaagaggagacaacttacaacaaagaatcacagatgagagaaagcgagaggaaataaagataaaacagcagctgttacagacaaaacataatgctctcaaggatttgaggtctcaaagaagaaaaaaggctctagaaatttctcatcagtggtatcagtacaagaggcaggctgatgatctcctgaaatgcttggatgacattgaaaaaaaattagccagcctacctgagcccagagatgaaaggaaaataaaggaaattgatcgggaattgcagaagaagaaagaggagctgaatgcagtgcgtaggcaagctgagggcttgtctgaggatggggccgcaatggcagtggagccaactcagatccagctcagcaagcgctggcgggaaattgagagcaaatttgctcagtttcgaagactcaactttgcacaaattcacactgtccgtgaagaaacgatgatggtgatgactgaagacatgcctttggaaatttcttatgtgccttctacttatttgactgaaatcactcatgtctcacaagccctattagaagtggaacaacttctcaatgctcctgacctctgtgctaaggactttgaagatctctttaagcaagaggagtctctgaagaatataaaagatagtctacaacaaagctcaggtcggattgacattattcatagcaagaagacagcagcattgcaaagtgcaacgcctgtggaaagggtgaagctacaggaagctctctcccagcttgatttccaatgggaaaaagttaacaaaatgtacaaggaccgacaagggcgatttgacagatctgttgagaaatggcggcgttttcattatgatataaagatatttaatcagtggctaacagaagctgaacagtttctcagaaagacacaaattcctgagaattgggaacatgctaaatacaaatggtatcttaaggaactccaggatggcattgggcagcggcaaactgttgtcagaacattgaatgcaactggggaagaaataattcagcaatcctcaaaaacagatgccagtattctacaggaaaaattgggaagcctgaatctgcggtggcaggaggtctgcaaacagctgtcagacagaaaaaagaggctagaagaacaaaagaatatcttgtcagaatttcaaagagatttaaatgaatttgttttatggttggaggaagcagataacattgctagtatcccacttgaacctggaaaagagcagcaactaaaagaaaagcttgagcaagtcaagttactggtggaagagttgcccctgcgccagggaattctcaaacaattaaatgaaactggaggacccgtgcttgtaagtgctcccataagcccagaagagcaagataaacttgaaaataagctcaagcagacaaatctccagtggataaaggtttccagagctttacctgagaaacaaggagaaattgaagctcaaataaaagaccttgggcagcttgaaaaaaagcttgaagaccttgaagagcagttaaatcatctgctgctgtggttatctcctattaggaatcagttggaaatttataaccaaccaaaccaagaaggaccatttgacgttaaggaaactgaaatagcagttcaagctaaacaaccggatgtggaagagattttgtctaaagggcagcatttgtacaaggaaaaaccagccactcagccagtgaagaggaagttagaagatctgagctctgagtggaaggcggtaaaccgtttacttcaagagctgagggcaaagcagcctgacctagctcctggactgaccactattggagcctctcctactcagactgttactctggtgacacaacctgtggttactaaggaaactgccatctccaaactagaaatgccatcttccttgatgttggaggtacctgctctggcagatttcaaccgggcttggacagaacttaccgactggctttctctgcttgatcaagttataaaatcacagagggtgatggtgggtgaccttgaggatatcaacgagatgatcatcaagcagaaggcaacaatgcaggatttggaacagaggcgtccccagttggaagaactcattaccgctgcccaaaatttgaaaaacaagaccagcaatcaagaggctagaacaatcattacggatcgaattgaaagaattcagaatcagtgggatgaagtacaagaacaccttcagaaccggaggcaacagttgaatgaaatgttaaaggattcaacacaatggctggaagctaaggaagaagctgagcaggtcttaggacaggccagagccaagcttgagtcatggaaggagggtccctatacagtagatgcaatccaaaagaaaatcacagaaaccaagcagttggccaaagacctccgccagtggcagacaaatgtagatgtggcaaatgacttggccctgaaacttctccgggattattctgcagatgataccagaaaagtccacatgataacagagaatatcaatgcctcttggagaagcattcataaaagggtgagtgagcgagaggctgctttggaagaaactcatagattactgcaacagttccccctggacctggaaaagtttcttgcctggcttacagaagctgaaacaactgccaatgtcctacaggatgctacccgtaaggaaaggctcctagaagactccaagggagtaaaagagctgatgaaacaatggcaagacctccaaggtgaaattgaagctcacacagatgtttatcacaacctggatgaaaacagccaaaaaatcctgagatccctggaaggttccgatgatgcagtcctgttacaaagacgtttggataacatgaacttcaagtggagtgaacttcggaaaaagtctctcaacattaggtcccatttggaagccagttctgaccagtggaagcgtctgcacctttctctgcaggaacttctggtgtggctacagctgaaagatgatgaattaagccggcaggcacctattggaggcgactttccagcagttcagaagcagaacgatgtacatagggccttcaagagggaattgaaaactaaagaacctgtaatcatgagtactcttgagactgtacgaatatttctgacagagcagcctttggaaggactagagaaactctaccaggagcccagagagctgcctcctgaggagagagcccagaatgtcactcggcttctacgaaagcaggctgaggaggtcaatactgagtgggaaaaattgaacctgcactccgctgactggcagagaaaaatagatgagacccttgaaagactccgggaacttcaagaggccacggatgagctggacctcaagctgcgccaagctgaggtgatcaagggatcctggcagcccgtgggcgatctcctcattgactctctccaagatcacctcgagaaagtcaaggcacttcgaggagaaattgcgcctctgaaagagaacgtgagccacgtcaatgaccttgctcgccagcttaccactttgggcattcagctctcaccgtataacctcagcactctggaagacctgaacaccagatggaagcttctgcaggtggccgtcgaggaccgagtcaggcagctgcatgaagcccacagggactttggtccagcatctcagcactttctttccacgtctgtccagggtccctgggagagagccatctcgccaaacaaagtgccctactatatcaaccacgagactcaaacaacttgctgggaccatcccaaaatgacagagctctaccagtctttagctgacctgaataatgtcagattctcagcttataggactgccatgaaactccgaagactgcagaaggccctttgcttggatctcttgagcctgtcagctgcatgtgatgccttggaccagcacaacctcaagcaaaatgaccagcccatggatatcctgcagattattaattgtttgaccactatttatgaccgcctggagcaagagcacaacaatttggtcaacgtccctctctgcgtggatatgtgtctgaactggctgctgaatgtttatgatacgggacgaacagggaggatccgtgtcctgtcttttaaaactggcatcatttccctgtgtaaagcacatttggaagacaagtacagataccttttcaagcaagtggcaagttcaacaggattttgtgaccagcgcaggctgggcctccttctgcatgattctatccaaattccaagacagttgggtgaagttgcatcctttgggggcagtaacattgagccaagtgtccggagctgcttccaatttgctaataataagccagagatcgaagcggccctcttcctagactggatgagactggaaccccagtccatggtgtggctgcccgtcctgcacagagtggctgctgcagaaactgccaagcatcaggccaaatgtaacatctgcaaagagtgtccaatcattggattcaggtacaggagtctaaagcactttaattatgacatctgccaaagctgctttttttctggtcgagttgcaaaaggccataaaatgcactatcccatggtggaatattgcactccgactacatcaggagaagatgttcgagactttgccaaggtactaaaaaacaaatttcgaaccaaaaggtattttgcgaagcatccccgaatgggctacctgccagtgcagactgtcttagagggggacaacatggaaactcccgttactctgatcaacttctggccagtagattctgcgcctgcctcgtcccctcagctttcacacgatgatactcattcacgcattgaacattatgctagcaggctagcagaaatggaaaacagcaatggatcttatctaaatgatagcatctctcctaatgagagcatagatgatgaacatttgttaatccagcattactgccaaagtttgaaccaggactcccccctgagccagcctcgtagtcctgcccagatcttgatttccttagagagtgaggaaagaggggagctagagagaatcctagcagatcttgaggaagaaaacaggaatctgcaagcagaatatgaccgtctaaagcagcagcacgaacataaaggcctgtccccactgccgtcccctcctgaaatgatgcccacctctccccagagtccccgggatgctgagctcattgctgaggccaagctactgcgtcaacacaaaggccgcctggaagccaggatgcaaatcctggaagaccacaataaacagctggagtcacagttacacaggctaaggcagctgctggagcaaccccaggcagaggccaaagtgaatggcacaacggtgtcctctccttctacctctctacagaggtccgacagcagtcagcctatgctgctccgagtggttggcagtcaaacttcggactccatgggtgaggaagatcttctcagtcctccccaggacacaagcacagggttagaggaggtgatggagcaactcaacaactccttccctagttcaagaggaagaaatacccctggaaagccaatgagagaggacacaatgtaggaagtcttttccacatggcagatgatttgggcagagcgatggagtccttagtatcagtcatgacagatgaagaaggagcagaataaatgttttacaactcctgattcccgcatggtttttataatattcatacaacaaagaggattagacagtaagagtttacaagaaataaatctatatttttgtgaagggtagtggtattatactgtagatttcagtagtttctaagtctgttattgttttgttaacaatggcaggttttacacgtctatgcaattgtacaaaaaagttataagaaaactacatgtaaaatcttgatagctaaataacttgccatttctttatatggaacgcattttgggttgtttaaaaatttataacagttataaagaaagattgtaaactaaagtgtgctttataaaaaaaagttgtttataaaaacccctaaaaacaaaacaaacacacacacacacacatacacacacacacacaaaactttgaggcagcgcattgttttgcatccttttggcgtgatatccatatgaaattcatggctttttctttttttgcatattaaagataagacttcctctaccaccacaccaaatgactactacacactgctcatttgagaactgtcagctgagtggggcaggcttgagttttcatttcatatatctatatgtctataagtatataaatactatagttatatagataaagagatacgaatttctatagactgactttttccattttttaaatgttcatgtcacatcctaatagaaagaaattacttctagtcagtcatccaggcttacctgcttggtctagaatggatttttcccggagccggaagccaggaggaaactacaccacactaaaacattgtctacagctccagatgtttctcattttaaacaactttccactgacaacgaaagtaaagtaaagtattggatttttttaaagggaacatgtgaatgaatacacaggacttattatatcagagtgagtaatcggttggttggttgattgattgattgattgatacattcagcttcctgctgctagcaatgccacgatttagatttaatgatgcttcagtggaaatcaatcagaaggtattctgaccttgtgaacatcagaaggtattttttaactcccaagcagtagcaggacgatgatagggctggagggctatggattcccagcccatccctgtgaaggagtaggccactctttaagtgaaggattggatgattgttcataatacataaagttctctgtaattacaactaaattattatgccctcttctcacagtcaaaaggaactgggtggtttggtttttgttgcttttttagatttattgtcccatgtgggatgagtttttaaatgccacaagacataatttaaaataaataaactttgggaaaaggtgtaaaacagtagccccatcacatttgtgatactgacaggtatcaacccagaagcccatgaactgtgtttccatcctttgcatttctctgcgagtagttccacacaggtttgtaagtaagtaagaaagaaggcaaattgattcaaatgttacaaaaaaacccttcttggtggattagacaggttaaatatataaacaaacaaacaaaaattgctcaaaaaagaggagaaaagctcaagaggaaaagctaaggactggtaggaaaaagctttactctttcatgccattttatttctttttgatttttaaatcattcattcaatagataccaccgtgtgacctataattttgcaaatctgttacctctgacatcaagtgtaattagcttttggagagtgggctgacatcaagtgtaattagcttttggagagtgggttttgtccattattaataattaattaattaacatcaaacacggcttctcatgctatttctacctcactttggttttggggtgttcctgataattgtgcacacctgagttcacagcttcaccacttgtccattgcgttattttctttttcctttataattctttctttttccttcataattttcaaaagaaaacccaaagctctaaggtaacaaattaccaaattacatgaagatttggtttttgtcttgcatttttttcctttatgtgacgctggaccttttctttacccaaggatttttaaaactcagatttaaaacaaggggttactttacatcctactaagaagtttaagtaagtaagtttcattctaaaatcagaggtaaatagagtgcataaataattttgttttaatctttttgtttttcttttagacacattagctctggagtgagtctgtcataatatttgaacaaaaattgagagctttattgctgcattttaagcataattaatttggacattatttcgtgttgtgttctttataaccaccaagtattaaactgtaaatcataatgtaactgaagcataaacatcacatggcatgttttgtcattgttttcaggtactgagttcttacttgagtatcataatatattgtgttttaacaccaacactgtaacatttacgaattatttttttaaacttcagttttactgcattttcacaacatatcagacttcaccaaatatatgccttactattgtattatagtactgctttactgtgtatctcaataaagcacgcagttatgttacaaaaaa

SEQ ID NO: 457 - DNA, 7054 bp, Homo sapiens
  source 1..7054: mol_type = genomic DNA
acactagcaatggcaaagctttgtgcggaggcattgctggctgctctgaactaaaagcatccgtggggaccgaaagaggtttttgcacaccttattaaggaactccaggatggcattgggcagcggcaaactgttgtcagaacattgaatgcaactggggaagaaataattcagcaatcctcaaaaacagatgccagtattctacaggaaaaattgggaagcctgaatctgcggtggcaggaggtctgcaaacagctgtcagacagaaaaaagaggctagaagaacaaaagaatatcttgtcagaatttcaaagagatttaaatgaatttgttttatggttggaggaagcagataacattgctagtatcccacttgaacctggaaaagagcagcaactaaaagaaaagcttgagcaagtcaagttactggtggaagagttgcccctgcgccagggaattctcaaacaattaaatgaaactggaggacccgtgcttgtaagtgctcccataagcccagaagagcaagataaacttgaaaataagctcaagcagacaaatctccagtggataaaggtttccagagctttacctgagaaacaaggagaaattgaagctcaaataaaagaccttgggcagcttgaaaaaaagcttgaagaccttgaagagcagttaaatcatctgctgctgtggttatctcctattaggaatcagttggaaatttataaccaaccaaaccaagaaggaccatttgacgttaaggaaactgaaatagcagttcaagctaaacaaccggatgtggaagagattttgtctaaagggcagcatttgtacaaggaaaaaccagccactcagccagtgaagaggaagttagaagatctgagctctgagtggaaggcggtaaaccgtttacttcaagagctgagggcaaagcagcctgacctagctcctggactgaccactattggagcctctcctactcagactgttactctggtgacacaacctgtggttactaaggaaactgccatctccaaactagaaatgccatcttccttgatgttggaggtacctgctctggcagatttcaaccgggcttggacagaacttaccgactggctttctctgcttgatcaagttataaaatcacagagggtgatggtgggtgaccttgaggatatcaacgagatgatcatcaagcagaaggcaacaatgcaggatttggaacagaggcgtccccagttggaagaactcattaccgctgcccaaaatttgaaaaacaagaccagcaatcaagaggctagaacaatcattacggatcgaattgaaagaattcagaatcagtgggatgaagtacaagaacaccttcagaaccggaggcaacagttgaatgaaatgttaaaggattcaacacaatggctggaagctaaggaagaagctgagcaggtcttaggacaggccagagccaagcttgagtcatggaaggagggtccctatacagtagatgcaatccaaaagaaaatcacagaaaccaagcagttggccaaagacctccgccagtggcagacaaatgtagatgtggcaaatgacttggccctgaaacttctccgggattattctgcagatgataccagaaaagtccacatgataacagagaatatcaatgcctcttggagaagcattcataaaagggtgagtgagcgagaggctgctttggaagaaactcatagattactgcaacagttccccctggacctggaaaagtttcttgcctggcttacagaagctgaaacaactgccaatgtcctacaggatgctacccgtaaggaaaggctcctagaagactccaagggagtaaaagagctgatgaaacaatggcaagacctccaaggtgaaattgaagctcacacagatgtttatcacaacctggatgaaaacagccaaaaaatcctgagatccctggaaggttccgatgatgcagtcctgttacaaagacgtttggataacatgaacttcaagtggagtgaacttcggaaaaagtctctcaacattaggtcccatttggaagccagttctgaccagtggaagcgtctgcacctttctctgcaggaacttctggtgtggctacagctgaaagatgatgaattaagccggcaggcacctattggaggcgactttccagcagttcagaagcagaacgatgtacatagggccttcaagagggaattgaaaactaaagaacctgtaatcatgagtactcttgagactgtacgaatatttctgacagagcagcctttggaaggactagagaaactctaccaggagcccagagagctgcctcctgaggagagagcccagaatgtcactcggcttctacgaaagcaggctgaggaggtcaatactgagtgggaaaaattgaacctgcactccgctgactggcagagaaaaatagatgagacccttgaaagactccgggaacttcaagaggccacggatgagctggacctcaagctgcgccaagctgaggtgatcaagggatcctggcagcccgtgggcgatctcctcattgactctctccaagatcacctcgagaaagtcaaggcacttcgaggagaaattgcgcctctgaaagagaacgtgagccacgtcaatgaccttgctcgccagcttaccactttgggcattcagctctcaccgtataacctcagcactctggaagacctgaacaccagatggaagcttctgcaggtggccgtcgaggaccgagtcaggcagctgcatgaagcccacagggactttggtccagcatctcagcactttctttccacgtctgtccagggtccctgggagagagccatctcgccaaacaaagtgccctactatatcaaccacgagactcaaacaacttgctgggaccatcccaaaatgacagagctctaccagtctttagctgacctgaataatgtcagattctcagcttataggactgccatgaaactccgaagactgcagaaggccctttgcttggatctcttgagcctgtcagctgcatgtgatgccttggaccagcacaacctcaagcaaaatgaccagcccatggatatcctgcagattattaattgtttgaccactatttatgaccgcctggagcaagagcacaacaatttggtcaacgtccctctctgcgtggatatgtgtctgaactggctgctgaatgtttatgatacgggacgaacagggaggatccgtgtcctgtcttttaaaactggcatcatttccctgtgtaaagcacatttggaagacaagtacagataccttttcaagcaagtggcaagttcaacaggattttgtgaccagcgcaggctgggcctccttctgcatgattctatccaaattccaagacagttgggtgaagttgcatcctttgggggcagtaacattgagccaagtgtccggagctgcttccaatttgctaataataagccagagatcgaagcggccctcttcctagactggatgagactggaaccccagtccatggtgtggctgcccgtcctgcacagagtggctgctgcagaaactgccaagcatcaggccaaatgtaacatctgcaaagagtgtccaatcattggattcaggtacaggagtctaaagcactttaattatgacatctgccaaagctgctttttttctggtcgagttgcaaaaggccataaaatgcactatcccatggtggaatattgcactccgactacatcaggagaagatgttcgagactttgccaaggtactaaaaaacaaatttcgaaccaaaaggtattttgcgaagcatccccgaatgggctacctgccagtgcagactgtcttagagggggacaacatggaaacgaatctgcaagcagaatatgaccgtctaaagcagcagcacgaacataaaggcctgtccccactgccgtcccctcctgaaatgatgcccacctctccccagagtccccgggatgctgagctcattgctgaggccaagctactgcgtcaacacaaaggccgcctggaagccaggatgcaaatcctggaagaccacaataaacagctggagtcacagttacacaggctaaggcagctgctggagcaaccccaggcagaggccaaagtgaatggcacaacggtgtcctctccttctacctctctacagaggtccgacagcagtcagcctatgctgctccgagtggttggcagtcaaacttcggactccatgggtgaggaagatcttctcagtcctccccaggacacaagcacagggttagaggaggtgatggagcaactcaacaactccttccctagttcaagaggacacaatgtaggaagtcttttccacatggcagatgatttgggcagagcgatggagtccttagtatcagtcatgacagatgaagaaggagcagaataaatgttttacaactcctgattcccgcatggtttttataatattcatacaacaaagaggattagacagtaagagtttacaagaaataaatctatatttttgtgaagggtagtggtattatactgtagatttcagtagtttctaagtctgttattgttttgttaacaatggcaggttttacacgtctatgcaattgtacaaaaaagttataagaaaactacatgtaaaatcttgatagctaaataacttgccatttctttatatggaacgcattttgggttgtttaaaaatttataacagttataaagaaagattgtaaactaaagtgtgctttataaaaaaaagttgtttataaaaacccctaaaaacaaaacaaacacacacacacacacatacacacacacacacaaaactttgaggcagcgcattgttttgcatccttttggcgtgatatccatatgaaattcatggctttttctttttttgcatattaaagataagacttcctctaccaccacaccaaatgactactacacactgctcatttgagaactgtcagctgagtggggcaggcttgagttttcatttcatatatctatatgtctataagtatataaatactatagttatatagataaagagatacgaatttctatagactgactttttccattttttaaatgttcatgtcacatcctaatagaaagaaattacttctagtcagtcatccaggcttacctgcttggtctagaatggatttttcccggagccggaagccaggaggaaactacaccacactaaaacattgtctacagctccagatgtttctcattttaaacaactttccactgacaacgaaagtaaagtaaagtattggatttttttaaagggaacatgtgaatgaatacacaggacttattatatcagagtgagtaatcggttggttggttgattgattgattgattgatacattcagcttcctgctgctagcaatgccacgatttagatttaatgatgcttcagtggaaatcaatcagaaggtattctgaccttgtgaacatcagaaggtattttttaactcccaagcagtagcaggacgatgatagggctggagggctatggattcccagcccatccctgtgaaggagtaggccactctttaagtgaaggattggatgattgttcataatacataaagttctctgtaattacaactaaattattatgccctcttctcacagtcaaaaggaactgggtggtttggtttttgttgcttttttagatttattgtcccatgtgggatgagtttttaaatgccacaagacataatttaaaataaataaactttgggaaaaggtgtaaaacagtagccccatcacatttgtgatactgacaggtatcaacccagaagcccatgaactgtgtttccatcctttgcatttctctgcgagtagttccacacaggtttgtaagtaagtaagaaagaaggcaaattgattcaaatgttacaaaaaaacccttcttggtggattagacaggttaaatatataaacaaacaaacaaaaattgctcaaaaaagaggagaaaagctcaagaggaaaagctaaggactggtaggaaaaagctttactctttcatgccattttatttctttttgatttttaaatcattcattcaatagataccaccgtgtgacctataattttgcaaatctgttacctctgacatcaagtgtaattagcttttggagagtgggctgacatcaagtgtaattagcttttggagagtgggttttgtccattattaataattaattaattaacatcaaacacggcttctcatgctatttctacctcactttggttttggggtgttcctgataattgtgcacacctgagttcacagcttcaccacttgtccattgcgttattttctttttcctttataattctttctttttccttcataattttcaaaagaaaacccaaagctctaaggtaacaaattaccaaattacatgaagatttggtttttgtcttgcatttttttcctttatgtgacgctggaccttttctttacccaaggatttttaaaactcagatttaaaacaaggggttactttacatcctactaagaagtttaagtaagtaagtttcattctaaaatcagaggtaaatagagtgcataaataattttgttttaatctttttgtttttcttttagacacattagctctggagtgagtctgtcataatatttgaacaaaaattgagagctttattgctgcattttaagcataattaatttggacattatttcgtgttgtgttctttataaccaccaagtattaaactgtaaatcataatgtaactgaagcataaacatcacatggcatgttttgtcattgttttcaggtactgagttcttacttgagtatcataatatattgtgttttaacaccaacactgtaacatttacgaattatttttttaaacttcagttttactgcattttcacaacatatcagacttcaccaaatatatgccttactattgtattatagtactgctttactgtgtatctcaataaagcacgcagttatgttacaaaaaa

SEQ ID NO: 458 - DNA, 7086 bp, Homo sapiens
  source 1..7086: mol_type = genomic DNA
acactagcaatggcaaagctttgtgcggaggcattgctggctgctctgaactaaaagcatccgtggggaccgaaagaggtttttgcacaccttattaaggaactccaggatggcattgggcagcggcaaactgttgtcagaacattgaatgcaactggggaagaaataattcagcaatcctcaaaaacagatgccagtattctacaggaaaaattgggaagcctgaatctgcggtggcaggaggtctgcaaacagctgtcagacagaaaaaagaggctagaagaacaaaagaatatcttgtcagaatttcaaagagatttaaatgaatttgttttatggttggaggaagcagataacattgctagtatcccacttgaacctggaaaagagcagcaactaaaagaaaagcttgagcaagtcaagttactggtggaagagttgcccctgcgccagggaattctcaaacaattaaatgaaactggaggacccgtgcttgtaagtgctcccataagcccagaagagcaagataaacttgaaaataagctcaagcagacaaatctccagtggataaaggtttccagagctttacctgagaaacaaggagaaattgaagctcaaataaaagaccttgggcagcttgaaaaaaagcttgaagaccttgaagagcagttaaatcatctgctgctgtggttatctcctattaggaatcagttggaaatttataaccaaccaaaccaagaaggaccatttgacgttaaggaaactgaaatagcagttcaagctaaacaaccggatgtggaagagattttgtctaaagggcagcatttgtacaaggaaaaaccagccactcagccagtgaagaggaagttagaagatctgagctctgagtggaaggcggtaaaccgtttacttcaagagctgagggcaaagcagcctgacctagctcctggactgaccactattggagcctctcctactcagactgttactctggtgacacaacctgtggttactaaggaaactgccatctccaaactagaaatgccatcttccttgatgttggaggtacctgctctggcagatttcaaccgggcttggacagaacttaccgactggctttctctgcttgatcaagttataaaatcacagagggtgatggtgggtgaccttgaggatatcaacgagatgatcatcaagcagaaggcaacaatgcaggatttggaacagaggcgtccccagttggaagaactcattaccgctgcccaaaatttgaaaaacaagaccagcaatcaagaggctagaacaatcattacggatcgaattgaaagaattcagaatcagtgggatgaagtacaagaacaccttcagaaccggaggcaacagttgaatgaaatgttaaaggattcaacacaatggctggaagctaaggaagaagctgagcaggtcttaggacaggccagagccaagcttgagtcatggaaggagggtccctatacagtagatgcaatccaaaagaaaatcacagaaaccaagcagttggccaaagacctccgccagtggcagacaaatgtagatgtggcaaatgacttggccctgaaacttctccgggattattctgcagatgataccagaaaagtccacatgataacagagaatatcaatgcctcttggagaagcattcataaaagggtgagtgagcgagaggctgctttggaagaaactcatagattactgcaacagttccccctggacctggaaaagtttcttgcctggcttacagaagctgaaacaactgccaatgtcctacaggatgctacccgtaaggaaaggctcctagaagactccaagggagtaaaagagctgatgaaacaatggcaagacctccaaggtgaaattgaagctcacacagatgtttatcacaacctggatgaaaacagccaaaaaatcctgagatccctggaaggttccgatgatgcagtcctgttacaaagacgtttggataacatgaacttcaagtggagtgaacttcggaaaaagtctctcaacattaggtcccatttggaagccagttctgaccagtggaagcgtctgcacctttctctgcaggaacttctggtgtggctacagctgaaagatgatgaattaagccggcaggcacctattggaggcgactttccagcagttcagaagcagaacgatgtacatagggccttcaagagggaattgaaaactaaagaacctgtaatcatgagtactcttgagactgtacgaatatttctgacagagcagcctttggaaggactagagaaactctaccaggagcccagagagctgcctcctgaggagagagcccagaatgtcactcggcttctacgaaagcaggctgaggaggtcaatactgagtgggaaaaattgaacctgcactccgctgactggcagagaaaaatagatgagacccttgaaagactccgggaacttcaagaggccacggatgagctggacctcaagctgcgccaagctgaggtgatcaagggatcctggcagcccgtgggcgatctcctcattgactctctccaagatcacctcgagaaagtcaaggcacttcgaggagaaattgcgcctctgaaagagaacgtgagccacgtcaatgaccttgctcgccagcttaccactttgggcattcagctctcaccgtataacctcagcactctggaagacctgaacaccagatggaagcttctgcaggtggccgtcgaggaccgagtcaggcagctgcatgaagcccacagggactttggtccagcatctcagcactttctttccacgtctgtccagggtccctgggagagagccatctcgccaaacaaagtgccctactatatcaaccacgagactcaaacaacttgctgggaccatcccaaaatgacagagctctaccagtctttagctgacctgaataatgtcagattctcagcttataggactgccatgaaactccgaagactgcagaaggccctttgcttggatctcttgagcctgtcagctgcatgtgatgccttggaccagcacaacctcaagcaaaatgaccagcccatggatatcctgcagattattaattgtttgaccactatttatgaccgcctggagcaagagcacaacaatttggtcaacgtccctctctgcgtggatatgtgtctgaactggctgctgaatgtttatgatacgggacgaacagggaggatccgtgtcctgtcttttaaaactggcatcatttccctgtgtaaagcacatttggaagacaagtacagataccttttcaagcaagtggcaagttcaacaggattttgtgaccagcgcaggctgggcctccttctgcatgattctatccaaattccaagacagttgggtgaagttgcatcctttgggggcagtaacattgagccaagtgtccggagctgcttccaatttgctaataataagccagagatcgaagcggccctcttcctagactggatgagactggaaccccagtccatggtgtggctgcccgtcctgcacagagtggctgctgcagaaactgccaagcatcaggccaaatgtaacatctgcaaagagtgtccaatcattggattcaggtacaggagtctaaagcactttaattatgacatctgccaaagctgctttttttctggtcgagttgcaaaaggccataaaatgcactatcccatggtggaatattgcactccgactacatcaggagaagatgttcgagactttgccaaggtactaaaaaacaaatttcgaaccaaaaggtattttgcgaagcatccccgaatgggctacctgccagtgcagactgtcttagagggggacaacatggaaacgaatctgcaagcagaatatgaccgtctaaagcagcagcacgaacataaaggcctgtccccactgccgtcccctcctgaaatgatgcccacctctccccagagtccccgggatgctgagctcattgctgaggccaagctactgcgtcaacacaaaggccgcctggaagccaggatgcaaatcctggaagaccacaataaacagctggagtcacagttacacaggctaaggcagctgctggagcaaccccaggcagaggccaaagtgaatggcacaacggtgtcctctccttctacctctctacagaggtccgacagcagtcagcctatgctgctccgagtggttggcagtcaaacttcggactccatgggtgaggaagatcttctcagtcctccccaggacacaagcacagggttagaggaggtgatggagcaactcaacaactccttccctagttcaagaggaagaaatacccctggaaagccaatgagagaggacacaatgtaggaagtcttttccacatggcagatgatttgggcagagcgatggagtccttagtatcagtcatgacagatgaagaaggagcagaataaatgttttacaactcctgattcccgcatggtttttataatattcatacaacaaagaggattagacagtaagagtttacaagaaataaatctatatttttgtgaagggtagtggtattatactgtagatttcagtagtttctaagtctgttattgttttgttaacaatggcaggttttacacgtctatgcaattgtacaaaaaagttataagaaaactacatgtaaaatcttgatagctaaataacttgccatttctttatatggaacgcattttgggttgtttaaaaatttataacagttataaagaaagattgtaaactaaagtgtgctttataaaaaaaagttgtttataaaaacccctaaaaacaaaacaaacacacacacacacacatacacacacacacacaaaactttgaggcagcgcattgttttgcatccttttggcgtgatatccatatgaaattcatggctttttctttttttgcatattaaagataagacttcctctaccaccacaccaaatgactactacacactgctcatttgagaactgtcagctgagtggggcaggcttgagttttcatttcatatatctatatgtctataagtatataaatactatagttatatagataaagagatacgaatttctatagactgactttttccattttttaaatgttcatgtcacatcctaatagaaagaaattacttctagtcagtcatccaggcttacctgcttggtctagaatggatttttcccggagccggaagccaggaggaaactacaccacactaaaacattgtctacagctccagatgtttctcattttaaacaactttccactgacaacgaaagtaaagtaaagtattggatttttttaaagggaacatgtgaatgaatacacaggacttattatatcagagtgagtaatcggttggttggttgattgattgattgattgatacattcagcttcctgctgctagcaatgccacgatttagatttaatgatgcttcagtggaaatcaatcagaaggtattctgaccttgtgaacatcagaaggtattttttaactcccaagcagtagcaggacgatgatagggctggagggctatggattcccagcccatccctgtgaaggagtaggccactctttaagtgaaggattggatgattgttcataatacataaagttctctgtaattacaactaaattattatgccctcttctcacagtcaaaaggaactgggtggtttggtttttgttgcttttttagatttattgtcccatgtgggatgagtttttaaatgccacaagacataatttaaaataaataaactttgggaaaaggtgtaaaacagtagccccatcacatttgtgatactgacaggtatcaacccagaagcccatgaactgtgtttccatcctttgcatttctctgcgagtagttccacacaggtttgtaagtaagtaagaaagaaggcaaattgattcaaatgttacaaaaaaacccttcttggtggattagacaggttaaatatataaacaaacaaacaaaaattgctcaaaaaagaggagaaaagctcaagaggaaaagctaaggactggtaggaaaaagctttactctttcatgccattttatttctttttgatttttaaatcattcattcaatagataccaccgtgtgacctataattttgcaaatctgttacctctgacatcaagtgtaattagcttttggagagtgggctgacatcaagtgtaattagcttttggagagtgggttttgtccattattaataattaattaattaacatcaaacacggcttctcatgctatttctacctcactttggttttggggtgttcctgataattgtgcacacctgagttcacagcttcaccacttgtccattgcgttattttctttttcctttataattctttctttttccttcataattttcaaaagaaaacccaaagctctaaggtaacaaattaccaaattacatgaagatttggtttttgtcttgcatttttttcctttatgtgacgctggaccttttctttacccaaggatttttaaaactcagatttaaaacaaggggttactttacatcctactaagaagtttaagtaagtaagtttcattctaaaatcagaggtaaatagagtgcataaataattttgttttaatctttttgtttttcttttagacacattagctctggagtgagtctgtcataatatttgaacaaaaattgagagctttattgctgcattttaagcataattaatttggacattatttcgtgttgtgttctttataaccaccaagtattaaactgtaaatcataatgtaactgaagcataaacatcacatggcatgttttgtcattgttttcaggtactgagttcttacttgagtatcataatatattgtgttttaacaccaacactgtaacatttacgaattatttttttaaacttcagttttactgcattttcacaacatatcagacttcaccaaatatatgccttactattgtattatagtactgctttactgtgtatctcaataaagcacgcagttatgttacaaaaaa

SEQ ID NO: 459 - DNA, 7345 bp, Homo sapiens
  source 1..7345: mol_type = genomic DNA
acactagcaatggcaaagctttgtgcggaggcattgctggctgctctgaactaaaagcatccgtggggaccgaaagaggtttttgcacaccttattaaggaactccaggatggcattgggcagcggcaaactgttgtcagaacattgaatgcaactggggaagaaataattcagcaatcctcaaaaacagatgccagtattctacaggaaaaattgggaagcctgaatctgcggtggcaggaggtctgcaaacagctgtcagacagaaaaaagaggctagaagaacaaaagaatatcttgtcagaatttcaaagagatttaaatgaatttgttttatggttggaggaagcagataacattgctagtatcccacttgaacctggaaaagagcagcaactaaaagaaaagcttgagcaagtcaagttactggtggaagagttgcccctgcgccagggaattctcaaacaattaaatgaaactggaggacccgtgcttgtaagtgctcccataagcccagaagagcaagataaacttgaaaataagctcaagcagacaaatctccagtggataaaggtttccagagctttacctgagaaacaaggagaaattgaagctcaaataaaagaccttgggcagcttgaaaaaaagcttgaagaccttgaagagcagttaaatcatctgctgctgtggttatctcctattaggaatcagttggaaatttataaccaaccaaaccaagaaggaccatttgacgttaaggaaactgaaatagcagttcaagctaaacaaccggatgtggaagagattttgtctaaagggcagcatttgtacaaggaaaaaccagccactcagccagtgaagaggaagttagaagatctgagctctgagtggaaggcggtaaaccgtttacttcaagagctgagggcaaagcagcctgacctagctcctggactgaccactattggagcctctcctactcagactgttactctggtgacacaacctgtggttactaaggaaactgccatctccaaactagaaatgccatcttccttgatgttggaggtacctgctctggcagatttcaaccgggcttggacagaacttaccgactggctttctctgcttgatcaagttataaaatcacagagggtgatggtgggtgaccttgaggatatcaacgagatgatcatcaagcagaaggcaacaatgcaggatttggaacagaggcgtccccagttggaagaactcattaccgctgcccaaaatttgaaaaacaagaccagcaatcaagaggctagaacaatcattacggatcgaattgaaagaattcagaatcagtgggatgaagtacaagaacaccttcagaaccggaggcaacagttgaatgaaatgttaaaggattcaacacaatggctggaagctaaggaagaagctgagcaggtcttaggacaggccagagccaagcttgagtcatggaaggagggtccctatacagtagatgcaatccaaaagaaaatcacagaaaccaagcagttggccaaagacctccgccagtggcagacaaatgtagatgtggcaaatgacttggccctgaaacttctccgggattattctgcagatgataccagaaaagtccacatgataacagagaatatcaatgcctcttggagaagcattcataaaagggtgagtgagcgagaggctgctttggaagaaactcatagattactgcaacagttccccctggacctggaaaagtttcttgcctggcttacagaagctgaaacaactgccaatgtcctacaggatgctacccgtaaggaaaggctcctagaagactccaagggagtaaaagagctgatgaaacaatggcaagacctccaaggtgaaattgaagctcacacagatgtttatcacaacctggatgaaaacagccaaaaaatcctgagatccctggaaggttccgatgatgcagtcctgttacaaagacgtttggataacatgaacttcaagtggagtgaacttcggaaaaagtctctcaacattaggtcccatttggaagccagttctgaccagtggaagcgtctgcacctttctctgcaggaacttctggtgtggctacagctgaaagatgatgaattaagccggcaggcacctattggaggcgactttccagcagttcagaagcagaacgatgtacatagggccttcaagagggaattgaaaactaaagaacctgtaatcatgagtactcttgagactgtacgaatatttctgacagagcagcctttggaaggactagagaaactctaccaggagcccagagagctgcctcctgaggagagagcccagaatgtcactcggcttctacgaaagcaggctgaggaggtcaatactgagtgggaaaaattgaacctgcactccgctgactggcagagaaaaatagatgagacccttgaaagactccgggaacttcaagaggccacggatgagctggacctcaagctgcgccaagctgaggtgatcaagggatcctggcagcccgtgggcgatctcctcattgactctctccaagatcacctcgagaaagtcaaggcacttcgaggagaaattgcgcctctgaaagagaacgtgagccacgtcaatgaccttgctcgccagcttaccactttgggcattcagctctcaccgtataacctcagcactctggaagacctgaacaccagatggaagcttctgcaggtggccgtcgaggaccgagtcaggcagctgcatgaagcccacagggactttggtccagcatctcagcactttctttccacgtctgtccagggtccctgggagagagccatctcgccaaacaaagtgccctactatatcaaccacgagactcaaacaacttgctgggaccatcccaaaatgacagagctctaccagtctttagctgacctgaataatgtcagattctcagcttataggactgccatgaaactccgaagactgcagaaggccctttgcttggatctcttgagcctgtcagctgcatgtgatgccttggaccagcacaacctcaagcaaaatgaccagcccatggatatcctgcagattattaattgtttgaccactatttatgaccgcctggagcaagagcacaacaatttggtcaacgtccctctctgcgtggatatgtgtctgaactggctgctgaatgtttatgatacgggacgaacagggaggatccgtgtcctgtcttttaaaactggcatcatttccctgtgtaaagcacatttggaagacaagtacagataccttttcaagcaagtggcaagttcaacaggattttgtgaccagcgcaggctgggcctccttctgcatgattctatccaaattccaagacagttgggtgaagttgcatcctttgggggcagtaacattgagccaagtgtccggagctgcttccaatttgctaataataagccagagatcgaagcggccctcttcctagactggatgagactggaaccccagtccatggtgtggctgcccgtcctgcacagagtggctgctgcagaaactgccaagcatcaggccaaatgtaacatctgcaaagagtgtccaatcattggattcaggtacaggagtctaaagcactttaattatgacatctgccaaagctgctttttttctggtcgagttgcaaaaggccataaaatgcactatcccatggtggaatattgcactccgactacatcaggagaagatgttcgagactttgccaaggtactaaaaaacaaatttcgaaccaaaaggtattttgcgaagcatccccgaatgggctacctgccagtgcagactgtcttagagggggacaacatggaaacgcctgcctcgtcccctcagctttcacacgatgatactcattcacgcattgaacattatgctagcaggctagcagaaatggaaaacagcaatggatcttatctaaatgatagcatctctcctaatgagagcatagatgatgaacatttgttaatccagcattactgccaaagtttgaaccaggactcccccctgagccagcctcgtagtcctgcccagatcttgatttccttagagagtgaggaaagaggggagctagagagaatcctagcagatcttgaggaagaaaacaggaatctgcaagcagaatatgaccgtctaaagcagcagcacgaacataaaggcctgtccccactgccgtcccctcctgaaatgatgcccacctctccccagagtccccgggatgctgagctcattgctgaggccaagctactgcgtcaacacaaaggccgcctggaagccaggatgcaaatcctggaagaccacaataaacagctggagtcacagttacacaggctaaggcagctgctggagcaaccccaggcagaggccaaagtgaatggcacaacggtgtcctctccttctacctctctacagaggtccgacagcagtcagcctatgctgctccgagtggttggcagtcaaacttcggactccatgggtgaggaagatcttctcagtcctccccaggacacaagcacagggttagaggaggtgatggagcaactcaacaactccttccctagttcaagaggacacaatgtaggaagtcttttccacatggcagatgatttgggcagagcgatggagtccttagtatcagtcatgacagatgaagaaggagcagaataaatgttttacaactcctgattcccgcatggtttttataatattcatacaacaaagaggattagacagtaagagtttacaagaaataaatctatatttttgtgaagggtagtggtattatactgtagatttcagtagtttctaagtctgttattgttttgttaacaatggcaggttttacacgtctatgcaattgtacaaaaaagttataagaaaactacatgtaaaatcttgatagctaaataacttgccatttctttatatggaacgcattttgggttgtttaaaaatttataacagttataaagaaagattgtaaactaaagtgtgctttataaaaaaaagttgtttataaaaacccctaaaaacaaaacaaacacacacacacacacatacacacacacacacaaaactttgaggcagcgcattgttttgcatccttttggcgtgatatccatatgaaattcatggctttttctttttttgcatattaaagataagacttcctctaccaccacaccaaatgactactacacactgctcatttgagaactgtcagctgagtggggcaggcttgagttttcatttcatatatctatatgtctataagtatataaatactatagttatatagataaagagatacgaatttctatagactgactttttccattttttaaatgttcatgtcacatcctaatagaaagaaattacttctagtcagtcatccaggcttacctgcttggtctagaatggatttttcccggagccggaagccaggaggaaactacaccacactaaaacattgtctacagctccagatgtttctcattttaaacaactttccactgacaacgaaagtaaagtaaagtattggatttttttaaagggaacatgtgaatgaatacacaggacttattatatcagagtgagtaatcggttggttggttgattgattgattgattgatacattcagcttcctgctgctagcaatgccacgatttagatttaatgatgcttcagtggaaatcaatcagaaggtattctgaccttgtgaacatcagaaggtattttttaactcccaagcagtagcaggacgatgatagggctggagggctatggattcccagcccatccctgtgaaggagtaggccactctttaagtgaaggattggatgattgttcataatacataaagttctctgtaattacaactaaattattatgccctcttctcacagtcaaaaggaactgggtggtttggtttttgttgcttttttagatttattgtcccatgtgggatgagtttttaaatgccacaagacataatttaaaataaataaactttgggaaaaggtgtaaaacagtagccccatcacatttgtgatactgacaggtatcaacccagaagcccatgaactgtgtttccatcctttgcatttctctgcgagtagttccacacaggtttgtaagtaagtaagaaagaaggcaaattgattcaaatgttacaaaaaaacccttcttggtggattagacaggttaaatatataaacaaacaaacaaaaattgctcaaaaaagaggagaaaagctcaagaggaaaagctaaggactggtaggaaaaagctttactctttcatgccattttatttctttttgatttttaaatcattcattcaatagataccaccgtgtgacctataattttgcaaatctgttacctctgacatcaagtgtaattagcttttggagagtgggctgacatcaagtgtaattagcttttggagagtgggttttgtccattattaataattaattaattaacatcaaacacggcttctcatgctatttctacctcactttggttttggggtgttcctgataattgtgcacacctgagttcacagcttcaccacttgtccattgcgttattttctttttcctttataattctttctttttccttcataattttcaaaagaaaacccaaagctctaaggtaacaaattaccaaattacatgaagatttggtttttgtcttgcatttttttcctttatgtgacgctggaccttttctttacccaaggatttttaaaactcagatttaaaacaaggggttactttacatcctactaagaagtttaagtaagtaagtttcattctaaaatcagaggtaaatagagtgcataaataattttgttttaatctttttgtttttcttttagacacattagctctggagtgagtctgtcataatatttgaacaaaaattgagagctttattgctgcattttaagcataattaatttggacattatttcgtgttgtgttctttataaccaccaagtattaaactgtaaatcataatgtaactgaagcataaacatcacatggcatgttttgtcattgttttcaggtactgagttcttacttgagtatcataatatattgtgttttaacaccaacactgtaacatttacgaattatttttttaaacttcagttttactgcattttcacaacatatcagacttcaccaaatatatgccttactattgtattatagtactgctttactgtgtatctcaataaagcacgcagttatgttacaaaaaa

SEQ ID NO: 460 - DNA, 7384 bp, Homo sapiens
  source 1..7384: mol_type = genomic DNA
acactagcaatggcaaagctttgtgcggaggcattgctggctgctctgaactaaaagcatccgtggggaccgaaagaggtttttgcacaccttattaaggaactccaggatggcattgggcagcggcaaactgttgtcagaacattgaatgcaactggggaagaaataattcagcaatcctcaaaaacagatgccagtattctacaggaaaaattgggaagcctgaatctgcggtggcaggaggtctgcaaacagctgtcagacagaaaaaagaggctagaagaacaaaagaatatcttgtcagaatttcaaagagatttaaatgaatttgttttatggttggaggaagcagataacattgctagtatcccacttgaacctggaaaagagcagcaactaaaagaaaagcttgagcaagtcaagttactggtggaagagttgcccctgcgccagggaattctcaaacaattaaatgaaactggaggacccgtgcttgtaagtgctcccataagcccagaagagcaagataaacttgaaaataagctcaagcagacaaatctccagtggataaaggtttccagagctttacctgagaaacaaggagaaattgaagctcaaataaaagaccttgggcagcttgaaaaaaagcttgaagaccttgaagagcagttaaatcatctgctgctgtggttatctcctattaggaatcagttggaaatttataaccaaccaaaccaagaaggaccatttgacgttaaggaaactgaaatagcagttcaagctaaacaaccggatgtggaagagattttgtctaaagggcagcatttgtacaaggaaaaaccagccactcagccagtgaagaggaagttagaagatctgagctctgagtggaaggcggtaaaccgtttacttcaagagctgagggcaaagcagcctgacctagctcctggactgaccactattggagcctctcctactcagactgttactctggtgacacaacctgtggttactaaggaaactgccatctccaaactagaaatgccatcttccttgatgttggaggtacctgctctggcagatttcaaccgggcttggacagaacttaccgactggctttctctgcttgatcaagttataaaatcacagagggtgatggtgggtgaccttgaggatatcaacgagatgatcatcaagcagaaggcaacaatgcaggatttggaacagaggcgtccccagttggaagaactcattaccgctgcccaaaatttgaaaaacaagaccagcaatcaagaggctagaacaatcattacggatcgaattgaaagaattcagaatcagtgggatgaagtacaagaacaccttcagaaccggaggcaacagttgaatgaaatgttaaaggattcaacacaatggctggaagctaaggaagaagctgagcaggtcttaggacaggccagagccaagcttgagtcatggaaggagggtccctatacagtagatgcaatccaaaagaaaatcacagaaaccaagcagttggccaaagacctccgccagtggcagacaaatgtagatgtggcaaatgacttggccctgaaacttctccgggattattctgcagatgataccagaaaagtccacatgataacagagaatatcaatgcctcttggagaagcattcataaaagggtgagtgagcgagaggctgctttggaagaaactcatagattactgcaacagttccccctggacctggaaaagtttcttgcctggcttacagaagctgaaacaactgccaatgtcctacaggatgctacccgtaaggaaaggctcctagaagactccaagggagtaaaagagctgatgaaacaatggcaagacctccaaggtgaaattgaagctcacacagatgtttatcacaacctggatgaaaacagccaaaaaatcctgagatccctggaaggttccgatgatgcagtcctgttacaaagacgtttggataacatgaacttcaagtggagtgaacttcggaaaaagtctctcaacattaggtcccatttggaagccagttctgaccagtggaagcgtctgcacctttctctgcaggaacttctggtgtggctacagctgaaagatgatgaattaagccggcaggcacctattggaggcgactttccagcagttcagaagcagaacgatgtacatagggccttcaagagggaattgaaaactaaagaacctgtaatcatgagtactcttgagactgtacgaatatttctgacagagcagcctttggaaggactagagaaactctaccaggagcccagagagctgcctcctgaggagagagcccagaatgtcactcggcttctacgaaagcaggctgaggaggtcaatactgagtgggaaaaattgaacctgcactccgctgactggcagagaaaaatagatgagacccttgaaagactccgggaacttcaagaggccacggatgagctggacctcaagctgcgccaagctgaggtgatcaagggatcctggcagcccgtgggcgatctcctcattgactctctccaagatcacctcgagaaagtcaaggcacttcgaggagaaattgcgcctctgaaagagaacgtgagccacgtcaatgaccttgctcgccagcttaccactttgggcattcagctctcaccgtataacctcagcactctggaagacctgaacaccagatggaagcttctgcaggtggccgtcgaggaccgagtcaggcagctgcatgaagcccacagggactttggtccagcatctcagcactttctttccacgtctgtccagggtccctgggagagagccatctcgccaaacaaagtgccctactatatcaaccacgagactcaaacaacttgctgggaccatcccaaaatgacagagctctaccagtctttagctgacctgaataatgtcagattctcagcttataggactgccatgaaactccgaagactgcagaaggccctttgcttggatctcttgagcctgtcagctgcatgtgatgccttggaccagcacaacctcaagcaaaatgaccagcccatggatatcctgcagattattaattgtttgaccactatttatgaccgcctggagcaagagcacaacaatttggtcaacgtccctctctgcgtggatatgtgtctgaactggctgctgaatgtttatgatacgggacgaacagggaggatccgtgtcctgtcttttaaaactggcatcatttccctgtgtaaagcacatttggaagacaagtacagataccttttcaagcaagtggcaagttcaacaggattttgtgaccagcgcaggctgggcctccttctgcatgattctatccaaattccaagacagttgggtgaagttgcatcctttgggggcagtaacattgagccaagtgtccggagctgcttccaatttgctaataataagccagagatcgaagcggccctcttcctagactggatgagactggaaccccagtccatggtgtggctgcccgtcctgcacagagtggctgctgcagaaactgccaagcatcaggccaaatgtaacatctgcaaagagtgtccaatcattggattcaggtacaggagtctaaagcactttaattatgacatctgccaaagctgctttttttctggtcgagttgcaaaaggccataaaatgcactatcccatggtggaatattgcactccgactacatcaggagaagatgttcgagactttgccaaggtactaaaaaacaaatttcgaaccaaaaggtattttgcgaagcatccccgaatgggctacctgccagtgcagactgtcttagagggggacaacatggaaactcccgttactctgatcaacttctggccagtagattctgcgcctgcctcgtcccctcagctttcacacgatgatactcattcacgcattgaacattatgctagcaggctagcagaaatggaaaacagcaatggatcttatctaaatgatagcatctctcctaatgagagcatagatgatgaacatttgttaatccagcattactgccaaagtttgaaccaggactcccccctgagccagcctcgtagtcctgcccagatcttgatttccttagagagtgaggaaagaggggagctagagagaatcctagcagatcttgaggaagaaaacaggaatctgcaagcagaatatgaccgtctaaagcagcagcacgaacataaaggcctgtccccactgccgtcccctcctgaaatgatgcccacctctccccagagtccccgggatgctgagctcattgctgaggccaagctactgcgtcaacacaaaggccgcctggaagccaggatgcaaatcctggaagaccacaataaacagctggagtcacagttacacaggctaaggcagctgctggagcaaccccaggcagaggccaaagtgaatggcacaacggtgtcctctccttctacctctctacagaggtccgacagcagtcagcctatgctgctccgagtggttggcagtcaaacttcggactccatgggtgaggaagatcttctcagtcctccccaggacacaagcacagggttagaggaggtgatggagcaactcaacaactccttccctagttcaagaggacacaatgtaggaagtcttttccacatggcagatgatttgggcagagcgatggagtccttagtatcagtcatgacagatgaagaaggagcagaataaatgttttacaactcctgattcccgcatggtttttataatattcatacaacaaagaggattagacagtaagagtttacaagaaataaatctatatttttgtgaagggtagtggtattatactgtagatttcagtagtttctaagtctgttattgttttgttaacaatggcaggttttacacgtctatgcaattgtacaaaaaagttataagaaaactacatgtaaaatcttgatagctaaataacttgccatttctttatatggaacgcattttgggttgtttaaaaatttataacagttataaagaaagattgtaaactaaagtgtgctttataaaaaaaagttgtttataaaaacccctaaaaacaaaacaaacacacacacacacacatacacacacacacacaaaactttgaggcagcgcattgttttgcatccttttggcgtgatatccatatgaaattcatggctttttctttttttgcatattaaagataagacttcctctaccaccacaccaaatgactactacacactgctcatttgagaactgtcagctgagtggggcaggcttgagttttcatttcatatatctatatgtctataagtatataaatactatagttatatagataaagagatacgaatttctatagactgactttttccattttttaaatgttcatgtcacatcctaatagaaagaaattacttctagtcagtcatccaggcttacctgcttggtctagaatggatttttcccggagccggaagccaggaggaaactacaccacactaaaacattgtctacagctccagatgtttctcattttaaacaactttccactgacaacgaaagtaaagtaaagtattggatttttttaaagggaacatgtgaatgaatacacaggacttattatatcagagtgagtaatcggttggttggttgattgattgattgattgatacattcagcttcctgctgctagcaatgccacgatttagatttaatgatgcttcagtggaaatcaatcagaaggtattctgaccttgtgaacatcagaaggtattttttaactcccaagcagtagcaggacgatgatagggctggagggctatggattcccagcccatccctgtgaaggagtaggccactctttaagtgaaggattggatgattgttcataatacataaagttctctgtaattacaactaaattattatgccctcttctcacagtcaaaaggaactgggtggtttggtttttgttgcttttttagatttattgtcccatgtgggatgagtttttaaatgccacaagacataatttaaaataaataaactttgggaaaaggtgtaaaacagtagccccatcacatttgtgatactgacaggtatcaacccagaagcccatgaactgtgtttccatcctttgcatttctctgcgagtagttccacacaggtttgtaagtaagtaagaaagaaggcaaattgattcaaatgttacaaaaaaacccttcttggtggattagacaggttaaatatataaacaaacaaacaaaaattgctcaaaaaagaggagaaaagctcaagaggaaaagctaaggactggtaggaaaaagctttactctttcatgccattttatttctttttgatttttaaatcattcattcaatagataccaccgtgtgacctataattttgcaaatctgttacctctgacatcaagtgtaattagcttttggagagtgggctgacatcaagtgtaattagcttttggagagtgggttttgtccattattaataattaattaattaacatcaaacacggcttctcatgctatttctacctcactttggttttggggtgttcctgataattgtgcacacctgagttcacagcttcaccacttgtccattgcgttattttctttttcctttataattctttctttttccttcataattttcaaaagaaaacccaaagctctaaggtaacaaattaccaaattacatgaagatttggtttttgtcttgcatttttttcctttatgtgacgctggaccttttctttacccaaggatttttaaaactcagatttaaaacaaggggttactttacatcctactaagaagtttaagtaagtaagtttcattctaaaatcagaggtaaatagagtgcataaataattttgttttaatctttttgtttttcttttagacacattagctctggagtgagtctgtcataatatttgaacaaaaattgagagctttattgctgcattttaagcataattaatttggacattatttcgtgttgtgttctttataaccaccaagtattaaactgtaaatcataatgtaactgaagcataaacatcacatggcatgttttgtcattgttttcaggtactgagttcttacttgagtatcataatatattgtgttttaacaccaacactgtaacatttacgaattatttttttaaacttcagttttactgcattttcacaacatatcagacttcaccaaatatatgccttactattgtattatagtactgctttactgtgtatctcaataaagcacgcagttatgttacaaaaaa

SEQ ID NO: 461 - DNA, 7416 bp, Homo sapiens
  source 1..7416: mol_type = genomic DNA
acactagcaatggcaaagctttgtgcggaggcattgctggctgctctgaactaaaagcatccgtggggaccgaaagaggtttttgcacaccttattaaggaactccaggatggcattgggcagcggcaaactgttgtcagaacattgaatgcaactggggaagaaataattcagcaatcctcaaaaacagatgccagtattctacaggaaaaattgggaagcctgaatctgcggtggcaggaggtctgcaaacagctgtcagacagaaaaaagaggctagaagaacaaaagaatatcttgtcagaatttcaaagagatttaaatgaatttgttttatggttggaggaagcagataacattgctagtatcccacttgaacctggaaaagagcagcaactaaaagaaaagcttgagcaagtcaagttactggtggaagagttgcccctgcgccagggaattctcaaacaattaaatgaaactggaggacccgtgcttgtaagtgctcccataagcccagaagagcaagataaacttgaaaataagctcaagcagacaaatctccagtggataaaggtttccagagctttacctgagaaacaaggagaaattgaagctcaaataaaagaccttgggcagcttgaaaaaaagcttgaagaccttgaagagcagttaaatcatctgctgctgtggttatctcctattaggaatcagttggaaatttataaccaaccaaaccaagaaggaccatttgacgttaaggaaactgaaatagcagttcaagctaaacaaccggatgtggaagagattttgtctaaagggcagcatttgtacaaggaaaaaccagccactcagccagtgaagaggaagttagaagatctgagctctgagtggaaggcggtaaaccgtttacttcaagagctgagggcaaagcagcctgacctagctcctggactgaccactattggagcctctcctactcagactgttactctggtgacacaacctgtggttactaaggaaactgccatctccaaactagaaatgccatcttccttgatgttggaggtacctgctctggcagatttcaaccgggcttggacagaacttaccgactggctttctctgcttgatcaagttataaaatcacagagggtgatggtgggtgaccttgaggatatcaacgagatgatcatcaagcagaaggcaacaatgcaggatttggaacagaggcgtccccagttggaagaactcattaccgctgcccaaaatttgaaaaacaagaccagcaatcaagaggctagaacaatcattacggatcgaattgaaagaattcagaatcagtgggatgaagtacaagaacaccttcagaaccggaggcaacagttgaatgaaatgttaaaggattcaacacaatggctggaagctaaggaagaagctgagcaggtcttaggacaggccagagccaagcttgagtcatggaaggagggtccctatacagtagatgcaatccaaaagaaaatcacagaaaccaagcagttggccaaagacctccgccagtggcagacaaatgtagatgtggcaaatgacttggccctgaaacttctccgggattattctgcagatgataccagaaaagtccacatgataacagagaatatcaatgcctcttggagaagcattcataaaagggtgagtgagcgagaggctgctttggaagaaactcatagattactgcaacagttccccctggacctggaaaagtttcttgcctggcttacagaagctgaaacaactgccaatgtcctacaggatgctacccgtaaggaaaggctcctagaagactccaagggagtaaaagagctgatgaaacaatggcaagacctccaaggtgaaattgaagctcacacagatgtttatcacaacctggatgaaaacagccaaaaaatcctgagatccctggaaggttccgatgatgcagtcctgttacaaagacgtttggataacatgaacttcaagtggagtgaacttcggaaaaagtctctcaacattaggtcccatttggaagccagttctgaccagtggaagcgtctgcacctttctctgcaggaacttctggtgtggctacagctgaaagatgatgaattaagccggcaggcacctattggaggcgactttccagcagttcagaagcagaacgatgtacatagggccttcaagagggaattgaaaactaaagaacctgtaatcatgagtactcttgagactgtacgaatatttctgacagagcagcctttggaaggactagagaaactctaccaggagcccagagagctgcctcctgaggagagagcccagaatgtcactcggcttctacgaaagcaggctgaggaggtcaatactgagtgggaaaaattgaacctgcactccgctgactggcagagaaaaatagatgagacccttgaaagactccgggaacttcaagaggccacggatgagctggacctcaagctgcgccaagctgaggtgatcaagggatcctggcagcccgtgggcgatctcctcattgactctctccaagatcacctcgagaaagtcaaggcacttcgaggagaaattgcgcctctgaaagagaacgtgagccacgtcaatgaccttgctcgccagcttaccactttgggcattcagctctcaccgtataacctcagcactctggaagacctgaacaccagatggaagcttctgcaggtggccgtcgaggaccgagtcaggcagctgcatgaagcccacagggactttggtccagcatctcagcactttctttccacgtctgtccagggtccctgggagagagccatctcgccaaacaaagtgccctactatatcaaccacgagactcaaacaacttgctgggaccatcccaaaatgacagagctctaccagtctttagctgacctgaataatgtcagattctcagcttataggactgccatgaaactccgaagactgcagaaggccctttgcttggatctcttgagcctgtcagctgcatgtgatgccttggaccagcacaacctcaagcaaaatgaccagcccatggatatcctgcagattattaattgtttgaccactatttatgaccgcctggagcaagagcacaacaatttggtcaacgtccctctctgcgtggatatgtgtctgaactggctgctgaatgtttatgatacgggacgaacagggaggatccgtgtcctgtcttttaaaactggcatcatttccctgtgtaaagcacatttggaagacaagtacagataccttttcaagcaagtggcaagttcaacaggattttgtgaccagcgcaggctgggcctccttctgcatgattctatccaaattccaagacagttgggtgaagttgcatcctttgggggcagtaacattgagccaagtgtccggagctgcttccaatttgctaataataagccagagatcgaagcggccctcttcctagactggatgagactggaaccccagtccatggtgtggctgcccgtcctgcacagagtggctgctgcagaaactgccaagcatcaggccaaatgtaacatctgcaaagagtgtccaatcattggattcaggtacaggagtctaaagcactttaattatgacatctgccaaagctgctttttttctggtcgagttgcaaaaggccataaaatgcactatcccatggtggaatattgcactccgactacatcaggagaagatgttcgagactttgccaaggtactaaaaaacaaatttcgaaccaaaaggtattttgcgaagcatccccgaatgggctacctgccagtgcagactgtcttagagggggacaacatggaaactcccgttactctgatcaacttctggccagtagattctgcgcctgcctcgtcccctcagctttcacacgatgatactcattcacgcattgaacattatgctagcaggctagcagaaatggaaaacagcaatggatcttatctaaatgatagcatctctcctaatgagagcatagatgatgaacatttgttaatccagcattactgccaaagtttgaaccaggactcccccctgagccagcctcgtagtcctgcccagatcttgatttccttagagagtgaggaaagaggggagctagagagaatcctagcagatcttgaggaagaaaacaggaatctgcaagcagaatatgaccgtctaaagcagcagcacgaacataaaggcctgtccccactgccgtcccctcctgaaatgatgcccacctctccccagagtccccgggatgctgagctcattgctgaggccaagctactgcgtcaacacaaaggccgcctggaagccaggatgcaaatcctggaagaccacaataaacagctggagtcacagttacacaggctaaggcagctgctggagcaaccccaggcagaggccaaagtgaatggcacaacggtgtcctctccttctacctctctacagaggtccgacagcagtcagcctatgctgctccgagtggttggcagtcaaacttcggactccatgggtgaggaagatcttctcagtcctccccaggacacaagcacagggttagaggaggtgatggagcaactcaacaactccttccctagttcaagaggaagaaatacccctggaaagccaatgagagaggacacaatgtaggaagtcttttccacatggcagatgatttgggcagagcgatggagtccttagtatcagtcatgacagatgaagaaggagcagaataaatgttttacaactcctgattcccgcatggtttttataatattcatacaacaaagaggattagacagtaagagtttacaagaaataaatctatatttttgtgaagggtagtggtattatactgtagatttcagtagtttctaagtctgttattgttttgttaacaatggcaggttttacacgtctatgcaattgtacaaaaaagttataagaaaactacatgtaaaatcttgatagctaaataacttgccatttctttatatggaacgcattttgggttgtttaaaaatttataacagttataaagaaagattgtaaactaaagtgtgctttataaaaaaaagttgtttataaaaacccctaaaaacaaaacaaacacacacacacacacatacacacacacacacaaaactttgaggcagcgcattgttttgcatccttttggcgtgatatccatatgaaattcatggctttttctttttttgcatattaaagataagacttcctctaccaccacaccaaatgactactacacactgctcatttgagaactgtcagctgagtggggcaggcttgagttttcatttcatatatctatatgtctataagtatataaatactatagttatatagataaagagatacgaatttctatagactgactttttccattttttaaatgttcatgtcacatcctaatagaaagaaattacttctagtcagtcatccaggcttacctgcttggtctagaatggatttttcccggagccggaagccaggaggaaactacaccacactaaaacattgtctacagctccagatgtttctcattttaaacaactttccactgacaacgaaagtaaagtaaagtattggatttttttaaagggaacatgtgaatgaatacacaggacttattatatcagagtgagtaatcggttggttggttgattgattgattgattgatacattcagcttcctgctgctagcaatgccacgatttagatttaatgatgcttcagtggaaatcaatcagaaggtattctgaccttgtgaacatcagaaggtattttttaactcccaagcagtagcaggacgatgatagggctggagggctatggattcccagcccatccctgtgaaggagtaggccactctttaagtgaaggattggatgattgttcataatacataaagttctctgtaattacaactaaattattatgccctcttctcacagtcaaaaggaactgggtggtttggtttttgttgcttttttagatttattgtcccatgtgggatgagtttttaaatgccacaagacataatttaaaataaataaactttgggaaaaggtgtaaaacagtagccccatcacatttgtgatactgacaggtatcaacccagaagcccatgaactgtgtttccatcctttgcatttctctgcgagtagttccacacaggtttgtaagtaagtaagaaagaaggcaaattgattcaaatgttacaaaaaaacccttcttggtggattagacaggttaaatatataaacaaacaaacaaaaattgctcaaaaaagaggagaaaagctcaagaggaaaagctaaggactggtaggaaaaagctttactctttcatgccattttatttctttttgatttttaaatcattcattcaatagataccaccgtgtgacctataattttgcaaatctgttacctctgacatcaagtgtaattagcttttggagagtgggctgacatcaagtgtaattagcttttggagagtgggttttgtccattattaataattaattaattaacatcaaacacggcttctcatgctatttctacctcactttggttttggggtgttcctgataattgtgcacacctgagttcacagcttcaccacttgtccattgcgttattttctttttcctttataattctttctttttccttcataattttcaaaagaaaacccaaagctctaaggtaacaaattaccaaattacatgaagatttggtttttgtcttgcatttttttcctttatgtgacgctggaccttttctttacccaaggatttttaaaactcagatttaaaacaaggggttactttacatcctactaagaagtttaagtaagtaagtttcattctaaaatcagaggtaaatagagtgcataaataattttgttttaatctttttgtttttcttttagacacattagctctggagtgagtctgtcataatatttgaacaaaaattgagagctttattgctgcattttaagcataattaatttggacattatttcgtgttgtgttctttataaccaccaagtattaaactgtaaatcataatgtaactgaagcataaacatcacatggcatgttttgtcattgttttcaggtactgagttcttacttgagtatcataatatattgtgttttaacaccaacactgtaacatttacgaattatttttttaaacttcagttttactgcattttcacaacatatcagacttcaccaaatatatgccttactattgtattatagtactgctttactgtgtatctcaataaagcacgcagttatgttacaaaaaa

SEQ ID NO: 462 - DNA, 5627 bp, Homo sapiens
  source 1..5627: mol_type = genomic DNA
gttttctcaggattgctatgcaacaggatcagtgctgtagtgcccggttcaagctgaaaatgttacacaggaagacataccatgtaaaggacctccaaggtgaaattgaagctcacacagatgtttatcacaacctggatgaaaacagccaaaaaatcctgagatccctggaaggttccgatgatgcagtcctgttacaaagacgtttggataacatgaacttcaagtggagtgaacttcggaaaaagtctctcaacattaggtcccatttggaagccagttctgaccagtggaagcgtctgcacctttctctgcaggaacttctggtgtggctacagctgaaagatgatgaattaagccggcaggcacctattggaggcgactttccagcagttcagaagcagaacgatgtacatagggccttcaagagggaattgaaaactaaagaacctgtaatcatgagtactcttgagactgtacgaatatttctgacagagcagcctttggaaggactagagaaactctaccaggagcccagagagctgcctcctgaggagagagcccagaatgtcactcggcttctacgaaagcaggctgaggaggtcaatactgagtgggaaaaattgaacctgcactccgctgactggcagagaaaaatagatgagacccttgaaagactccgggaacttcaagaggccacggatgagctggacctcaagctgcgccaagctgaggtgatcaagggatcctggcagcccgtgggcgatctcctcattgactctctccaagatcacctcgagaaagtcaaggcacttcgaggagaaattgcgcctctgaaagagaacgtgagccacgtcaatgaccttgctcgccagcttaccactttgggcattcagctctcaccgtataacctcagcactctggaagacctgaacaccagatggaagcttctgcaggtggccgtcgaggaccgagtcaggcagctgcatgaagcccacagggactttggtccagcatctcagcactttctttccacgtctgtccagggtccctgggagagagccatctcgccaaacaaagtgccctactatatcaaccacgagactcaaacaacttgctgggaccatcccaaaatgacagagctctaccagtctttagctgacctgaataatgtcagattctcagcttataggactgccatgaaactccgaagactgcagaaggccctttgcttggatctcttgagcctgtcagctgcatgtgatgccttggaccagcacaacctcaagcaaaatgaccagcccatggatatcctgcagattattaattgtttgaccactatttatgaccgcctggagcaagagcacaacaatttggtcaacgtccctctctgcgtggatatgtgtctgaactggctgctgaatgtttatgatacgggacgaacagggaggatccgtgtcctgtcttttaaaactggcatcatttccctgtgtaaagcacatttggaagacaagtacagataccttttcaagcaagtggcaagttcaacaggattttgtgaccagcgcaggctgggcctccttctgcatgattctatccaaattccaagacagttgggtgaagttgcatcctttgggggcagtaacattgagccaagtgtccggagctgcttccaatttgctaataataagccagagatcgaagcggccctcttcctagactggatgagactggaaccccagtccatggtgtggctgcccgtcctgcacagagtggctgctgcagaaactgccaagcatcaggccaaatgtaacatctgcaaagagtgtccaatcattggattcaggtacaggagtctaaagcactttaattatgacatctgccaaagctgctttttttctggtcgagttgcaaaaggccataaaatgcactatcccatggtggaatattgcactccgactacatcaggagaagatgttcgagactttgccaaggtactaaaaaacaaatttcgaaccaaaaggtattttgcgaagcatccccgaatgggctacctgccagtgcagactgtcttagagggggacaacatggaaactcccgttactctgatcaacttctggccagtagattctgcgcctgcctcgtcccctcagctttcacacgatgatactcattcacgcattgaacattatgctagcaggctagcagaaatggaaaacagcaatggatcttatctaaatgatagcatctctcctaatgagagcatagatgatgaacatttgttaatccagcattactgccaaagtttgaaccaggactcccccctgagccagcctcgtagtcctgcccagatcttgatttccttagagagtgaggaaagaggggagctagagagaatcctagcagatcttgaggaagaaaacaggaatctgcaagcagaatatgaccgtctaaagcagcagcacgaacataaaggcctgtccccactgccgtcccctcctgaaatgatgcccacctctccccagagtccccgggatgctgagctcattgctgaggccaagctactgcgtcaacacaaaggccgcctggaagccaggatgcaaatcctggaagaccacaataaacagctggagtcacagttacacaggctaaggcagctgctggagcaaccccaggcagaggccaaagtgaatggcacaacggtgtcctctccttctacctctctacagaggtccgacagcagtcagcctatgctgctccgagtggttggcagtcaaacttcggactccatgggtgaggaagatcttctcagtcctccccaggacacaagcacagggttagaggaggtgatggagcaactcaacaactccttccctagttcaagaggaagaaatacccctggaaagccaatgagagaggacacaatgtaggaagtcttttccacatggcagatgatttgggcagagcgatggagtccttagtatcagtcatgacagatgaagaaggagcagaataaatgttttacaactcctgattcccgcatggtttttataatattcatacaacaaagaggattagacagtaagagtttacaagaaataaatctatatttttgtgaagggtagtggtattatactgtagatttcagtagtttctaagtctgttattgttttgttaacaatggcaggttttacacgtctatgcaattgtacaaaaaagttataagaaaactacatgtaaaatcttgatagctaaataacttgccatttctttatatggaacgcattttgggttgtttaaaaatttataacagttataaagaaagattgtaaactaaagtgtgctttataaaaaaaagttgtttataaaaacccctaaaaacaaaacaaacacacacacacacacatacacacacacacacaaaactttgaggcagcgcattgttttgcatccttttggcgtgatatccatatgaaattcatggctttttctttttttgcatattaaagataagacttcctctaccaccacaccaaatgactactacacactgctcatttgagaactgtcagctgagtggggcaggcttgagttttcatttcatatatctatatgtctataagtatataaatactatagttatatagataaagagatacgaatttctatagactgactttttccattttttaaatgttcatgtcacatcctaatagaaagaaattacttctagtcagtcatccaggcttacctgcttggtctagaatggatttttcccggagccggaagccaggaggaaactacaccacactaaaacattgtctacagctccagatgtttctcattttaaacaactttccactgacaacgaaagtaaagtaaagtattggatttttttaaagggaacatgtgaatgaatacacaggacttattatatcagagtgagtaatcggttggttggttgattgattgattgattgatacattcagcttcctgctgctagcaatgccacgatttagatttaatgatgcttcagtggaaatcaatcagaaggtattctgaccttgtgaacatcagaaggtattttttaactcccaagcagtagcaggacgatgatagggctggagggctatggattcccagcccatccctgtgaaggagtaggccactctttaagtgaaggattggatgattgttcataatacataaagttctctgtaattacaactaaattattatgccctcttctcacagtcaaaaggaactgggtggtttggtttttgttgcttttttagatttattgtcccatgtgggatgagtttttaaatgccacaagacataatttaaaataaataaactttgggaaaaggtgtaaaacagtagccccatcacatttgtgatactgacaggtatcaacccagaagcccatgaactgtgtttccatcctttgcatttctctgcgagtagttccacacaggtttgtaagtaagtaagaaagaaggcaaattgattcaaatgttacaaaaaaacccttcttggtggattagacaggttaaatatataaacaaacaaacaaaaattgctcaaaaaagaggagaaaagctcaagaggaaaagctaaggactggtaggaaaaagctttactctttcatgccattttatttctttttgatttttaaatcattcattcaatagataccaccgtgtgacctataattttgcaaatctgttacctctgacatcaagtgtaattagcttttggagagtgggctgacatcaagtgtaattagcttttggagagtgggttttgtccattattaataattaattaattaacatcaaacacggcttctcatgctatttctacctcactttggttttggggtgttcctgataattgtgcacacctgagttcacagcttcaccacttgtccattgcgttattttctttttcctttataattctttctttttccttcataattttcaaaagaaaacccaaagctctaaggtaacaaattaccaaattacatgaagatttggtttttgtcttgcatttttttcctttatgtgacgctggaccttttctttacccaaggatttttaaaactcagatttaaaacaaggggttactttacatcctactaagaagtttaagtaagtaagtttcattctaaaatcagaggtaaatagagtgcataaataattttgttttaatctttttgtttttcttttagacacattagctctggagtgagtctgtcataatatttgaacaaaaattgagagctttattgctgcattttaagcataattaatttggacattatttcgtgttgtgttctttataaccaccaagtattaaactgtaaatcataatgtaactgaagcataaacatcacatggcatgttttgtcattgttttcaggtactgagttcttacttgagtatcataatatattgtgttttaacaccaacactgtaacatttacgaattatttttttaaacttcagttttactgcattttcacaacatatcagacttcaccaaatatatgccttactattgtattatagtactgctttactgtgtatctcaataaagcacgcagttatgttacaaaaaa

SEQ ID NO: 463 - DNA, 4605 bp, Homo sapiens
  source 1..4605: mol_type = genomic DNA
gcagtgctttcagctgtgagcttgggcggcggcggcggcggcgctccactttcggggagcccggcggctctgggaagctcactcctccactcgtacccacactcgaccgcggagcccttgcagccatgagggaacagctcaaaggccacgagactcaaacaacttgctgggaccatcccaaaatgacagagctctaccagtctttagctgacctgaataatgtcagattctcagcttataggactgccatgaaactccgaagactgcagaaggccctttgcttggatctcttgagcctgtcagctgcatgtgatgccttggaccagcacaacctcaagcaaaatgaccagcccatggatatcctgcagattattaattgtttgaccactatttatgaccgcctggagcaagagcacaacaatttggtcaacgtccctctctgcgtggatatgtgtctgaactggctgctgaatgtttatgatacgggacgaacagggaggatccgtgtcctgtcttttaaaactggcatcatttccctgtgtaaagcacatttggaagacaagtacagataccttttcaagcaagtggcaagttcaacaggattttgtgaccagcgcaggctgggcctccttctgcatgattctatccaaattccaagacagttgggtgaagttgcatcctttgggggcagtaacattgagccaagtgtccggagctgcttccaatttgctaataataagccagagatcgaagcggccctcttcctagactggatgagactggaaccccagtccatggtgtggctgcccgtcctgcacagagtggctgctgcagaaactgccaagcatcaggccaaatgtaacatctgcaaagagtgtccaatcattggattcaggtacaggagtctaaagcactttaattatgacatctgccaaagctgctttttttctggtcgagttgcaaaaggccataaaatgcactatcccatggtggaatattgcactccgactacatcaggagaagatgttcgagactttgccaaggtactaaaaaacaaatttcgaaccaaaaggtattttgcgaagcatccccgaatgggctacctgccagtgcagactgtcttagagggggacaacatggaaacgcctgcctcgtcccctcagctttcacacgatgatactcattcacgcattgaacattatgctagcaggctagcagaaatggaaaacagcaatggatcttatctaaatgatagcatctctcctaatgagagcatagatgatgaacatttgttaatccagcattactgccaaagtttgaaccaggactcccccctgagccagcctcgtagtcctgcccagatcttgatttccttagagagtgaggaaagaggggagctagagagaatcctagcagatcttgaggaagaaaacaggaatctgcaagcagaatatgaccgtctaaagcagcagcacgaacataaaggcctgtccccactgccgtcccctcctgaaatgatgcccacctctccccagagtccccgggatgctgagctcattgctgaggccaagctactgcgtcaacacaaaggccgcctggaagccaggatgcaaatcctggaagaccacaataaacagctggagtcacagttacacaggctaaggcagctgctggagcaaccccaggcagaggccaaagtgaatggcacaacggtgtcctctccttctacctctctacagaggtccgacagcagtcagcctatgctgctccgagtggttggcagtcaaacttcggactccatgggtgaggaagatcttctcagtcctccccaggacacaagcacagggttagaggaggtgatggagcaactcaacaactccttccctagttcaagaggacacaatgtaggaagtcttttccacatggcagatgatttgggcagagcgatggagtccttagtatcagtcatgacagatgaagaaggagcagaataaatgttttacaactcctgattcccgcatggtttttataatattcatacaacaaagaggattagacagtaagagtttacaagaaataaatctatatttttgtgaagggtagtggtattatactgtagatttcagtagtttctaagtctgttattgttttgttaacaatggcaggttttacacgtctatgcaattgtacaaaaaagttataagaaaactacatgtaaaatcttgatagctaaataacttgccatttctttatatggaacgcattttgggttgtttaaaaatttataacagttataaagaaagattgtaaactaaagtgtgctttataaaaaaaagttgtttataaaaacccctaaaaacaaaacaaacacacacacacacacatacacacacacacacaaaactttgaggcagcgcattgttttgcatccttttggcgtgatatccatatgaaattcatggctttttctttttttgcatattaaagataagacttcctctaccaccacaccaaatgactactacacactgctcatttgagaactgtcagctgagtggggcaggcttgagttttcatttcatatatctatatgtctataagtatataaatactatagttatatagataaagagatacgaatttctatagactgactttttccattttttaaatgttcatgtcacatcctaatagaaagaaattacttctagtcagtcatccaggcttacctgcttggtctagaatggatttttcccggagccggaagccaggaggaaactacaccacactaaaacattgtctacagctccagatgtttctcattttaaacaactttccactgacaacgaaagtaaagtaaagtattggatttttttaaagggaacatgtgaatgaatacacaggacttattatatcagagtgagtaatcggttggttggttgattgattgattgattgatacattcagcttcctgctgctagcaatgccacgatttagatttaatgatgcttcagtggaaatcaatcagaaggtattctgaccttgtgaacatcagaaggtattttttaactcccaagcagtagcaggacgatgatagggctggagggctatggattcccagcccatccctgtgaaggagtaggccactctttaagtgaaggattggatgattgttcataatacataaagttctctgtaattacaactaaattattatgccctcttctcacagtcaaaaggaactgggtggtttggtttttgttgcttttttagatttattgtcccatgtgggatgagtttttaaatgccacaagacataatttaaaataaataaactttgggaaaaggtgtaaaacagtagccccatcacatttgtgatactgacaggtatcaacccagaagcccatgaactgtgtttccatcctttgcatttctctgcgagtagttccacacaggtttgtaagtaagtaagaaagaaggcaaattgattcaaatgttacaaaaaaacccttcttggtggattagacaggttaaatatataaacaaacaaacaaaaattgctcaaaaaagaggagaaaagctcaagaggaaaagctaaggactggtaggaaaaagctttactctttcatgccattttatttctttttgatttttaaatcattcattcaatagataccaccgtgtgacctataattttgcaaatctgttacctctgacatcaagtgtaattagcttttggagagtgggctgacatcaagtgtaattagcttttggagagtgggttttgtccattattaataattaattaattaacatcaaacacggcttctcatgctatttctacctcactttggttttggggtgttcctgataattgtgcacacctgagttcacagcttcaccacttgtccattgcgttattttctttttcctttataattctttctttttccttcataattttcaaaagaaaacccaaagctctaaggtaacaaattaccaaattacatgaagatttggtttttgtcttgcatttttttcctttatgtgacgctggaccttttctttacccaaggatttttaaaactcagatttaaaacaaggggttactttacatcctactaagaagtttaagtaagtaagtttcattctaaaatcagaggtaaatagagtgcataaataattttgttttaatctttttgtttttcttttagacacattagctctggagtgagtctgtcataatatttgaacaaaaattgagagctttattgctgcattttaagcataattaatttggacattatttcgtgttgtgttctttataaccaccaagtattaaactgtaaatcataatgtaactgaagcataaacatcacatggcatgttttgtcattgttttcaggtactgagttcttacttgagtatcataatatattgtgttttaacaccaacactgtaacatttacgaattatttttttaaacttcagttttactgcattttcacaacatatcagacttcaccaaatatatgccttactattgtattatagtactgctttactgtgtatctcaataaagcacgcagttatgttacaaaaaa

SEQ ID NO: 464 - DNA, 4637 bp, Homo sapiens
  source 1..4637: mol_type = genomic DNA
gcagtgctttcagctgtgagcttgggcggcggcggcggcggcgctccactttcggggagcccggcggctctgggaagctcactcctccactcgtacccacactcgaccgcggagcccttgcagccatgagggaacagctcaaaggccacgagactcaaacaacttgctgggaccatcccaaaatgacagagctctaccagtctttagctgacctgaataatgtcagattctcagcttataggactgccatgaaactccgaagactgcagaaggccctttgcttggatctcttgagcctgtcagctgcatgtgatgccttggaccagcacaacctcaagcaaaatgaccagcccatggatatcctgcagattattaattgtttgaccactatttatgaccgcctggagcaagagcacaacaatttggtcaacgtccctctctgcgtggatatgtgtctgaactggctgctgaatgtttatgatacgggacgaacagggaggatccgtgtcctgtcttttaaaactggcatcatttccctgtgtaaagcacatttggaagacaagtacagataccttttcaagcaagtggcaagttcaacaggattttgtgaccagcgcaggctgggcctccttctgcatgattctatccaaattccaagacagttgggtgaagttgcatcctttgggggcagtaacattgagccaagtgtccggagctgcttccaatttgctaataataagccagagatcgaagcggccctcttcctagactggatgagactggaaccccagtccatggtgtggctgcccgtcctgcacagagtggctgctgcagaaactgccaagcatcaggccaaatgtaacatctgcaaagagtgtccaatcattggattcaggtacaggagtctaaagcactttaattatgacatctgccaaagctgctttttttctggtcgagttgcaaaaggccataaaatgcactatcccatggtggaatattgcactccgactacatcaggagaagatgttcgagactttgccaaggtactaaaaaacaaatttcgaaccaaaaggtattttgcgaagcatccccgaatgggctacctgccagtgcagactgtcttagagggggacaacatggaaacgcctgcctcgtcccctcagctttcacacgatgatactcattcacgcattgaacattatgctagcaggctagcagaaatggaaaacagcaatggatcttatctaaatgatagcatctctcctaatgagagcatagatgatgaacatttgttaatccagcattactgccaaagtttgaaccaggactcccccctgagccagcctcgtagtcctgcccagatcttgatttccttagagagtgaggaaagaggggagctagagagaatcctagcagatcttgaggaagaaaacaggaatctgcaagcagaatatgaccgtctaaagcagcagcacgaacataaaggcctgtccccactgccgtcccctcctgaaatgatgcccacctctccccagagtccccgggatgctgagctcattgctgaggccaagctactgcgtcaacacaaaggccgcctggaagccaggatgcaaatcctggaagaccacaataaacagctggagtcacagttacacaggctaaggcagctgctggagcaaccccaggcagaggccaaagtgaatggcacaacggtgtcctctccttctacctctctacagaggtccgacagcagtcagcctatgctgctccgagtggttggcagtcaaacttcggactccatgggtgaggaagatcttctcagtcctccccaggacacaagcacagggttagaggaggtgatggagcaactcaacaactccttccctagttcaagaggaagaaatacccctggaaagccaatgagagaggacacaatgtaggaagtcttttccacatggcagatgatttgggcagagcgatggagtccttagtatcagtcatgacagatgaagaaggagcagaataaatgttttacaactcctgattcccgcatggtttttataatattcatacaacaaagaggattagacagtaagagtttacaagaaataaatctatatttttgtgaagggtagtggtattatactgtagatttcagtagtttctaagtctgttattgttttgttaacaatggcaggttttacacgtctatgcaattgtacaaaaaagttataagaaaactacatgtaaaatcttgatagctaaataacttgccatttctttatatggaacgcattttgggttgtttaaaaatttataacagttataaagaaagattgtaaactaaagtgtgctttataaaaaaaagttgtttataaaaacccctaaaaacaaaacaaacacacacacacacacatacacacacacacacaaaactttgaggcagcgcattgttttgcatccttttggcgtgatatccatatgaaattcatggctttttctttttttgcatattaaagataagacttcctctaccaccacaccaaatgactactacacactgctcatttgagaactgtcagctgagtggggcaggcttgagttttcatttcatatatctatatgtctataagtatataaatactatagttatatagataaagagatacgaatttctatagactgactttttccattttttaaatgttcatgtcacatcctaatagaaagaaattacttctagtcagtcatccaggcttacctgcttggtctagaatggatttttcccggagccggaagccaggaggaaactacaccacactaaaacattgtctacagctccagatgtttctcattttaaacaactttccactgacaacgaaagtaaagtaaagtattggatttttttaaagggaacatgtgaatgaatacacaggacttattatatcagagtgagtaatcggttggttggttgattgattgattgattgatacattcagcttcctgctgctagcaatgccacgatttagatttaatgatgcttcagtggaaatcaatcagaaggtattctgaccttgtgaacatcagaaggtattttttaactcccaagcagtagcaggacgatgatagggctggagggctatggattcccagcccatccctgtgaaggagtaggccactctttaagtgaaggattggatgattgttcataatacataaagttctctgtaattacaactaaattattatgccctcttctcacagtcaaaaggaactgggtggtttggtttttgttgcttttttagatttattgtcccatgtgggatgagtttttaaatgccacaagacataatttaaaataaataaactttgggaaaaggtgtaaaacagtagccccatcacatttgtgatactgacaggtatcaacccagaagcccatgaactgtgtttccatcctttgcatttctctgcgagtagttccacacaggtttgtaagtaagtaagaaagaaggcaaattgattcaaatgttacaaaaaaacccttcttggtggattagacaggttaaatatataaacaaacaaacaaaaattgctcaaaaaagaggagaaaagctcaagaggaaaagctaaggactggtaggaaaaagctttactctttcatgccattttatttctttttgatttttaaatcattcattcaatagataccaccgtgtgacctataattttgcaaatctgttacctctgacatcaagtgtaattagcttttggagagtgggctgacatcaagtgtaattagcttttggagagtgggttttgtccattattaataattaattaattaacatcaaacacggcttctcatgctatttctacctcactttggttttggggtgttcctgataattgtgcacacctgagttcacagcttcaccacttgtccattgcgttattttctttttcctttataattctttctttttccttcataattttcaaaagaaaacccaaagctctaaggtaacaaattaccaaattacatgaagatttggtttttgtcttgcatttttttcctttatgtgacgctggaccttttctttacccaaggatttttaaaactcagatttaaaacaaggggttactttacatcctactaagaagtttaagtaagtaagtttcattctaaaatcagaggtaaatagagtgcataaataattttgttttaatctttttgtttttcttttagacacattagctctggagtgagtctgtcataatatttgaacaaaaattgagagctttattgctgcattttaagcataattaatttggacattatttcgtgttgtgttctttataaccaccaagtattaaactgtaaatcataatgtaactgaagcataaacatcacatggcatgttttgtcattgttttcaggtactgagttcttacttgagtatcataatatattgtgttttaacaccaacactgtaacatttacgaattatttttttaaacttcagttttactgcattttcacaacatatcagacttcaccaaatatatgccttactattgtattatagtactgctttactgtgtatctcaataaagcacgcagttatgttacaaaaaa

SEQ ID NO: 465 - DNA, 4644 bp, Homo sapiens
  source 1..4644: mol_type = genomic DNA
gcagtgctttcagctgtgagcttgggcggcggcggcggcggcgctccactttcggggagcccggcggctctgggaagctcactcctccactcgtacccacactcgaccgcggagcccttgcagccatgagggaacagctcaaaggccacgagactcaaacaacttgctgggaccatcccaaaatgacagagctctaccagtctttagctgacctgaataatgtcagattctcagcttataggactgccatgaaactccgaagactgcagaaggccctttgcttggatctcttgagcctgtcagctgcatgtgatgccttggaccagcacaacctcaagcaaaatgaccagcccatggatatcctgcagattattaattgtttgaccactatttatgaccgcctggagcaagagcacaacaatttggtcaacgtccctctctgcgtggatatgtgtctgaactggctgctgaatgtttatgatacgggacgaacagggaggatccgtgtcctgtcttttaaaactggcatcatttccctgtgtaaagcacatttggaagacaagtacagataccttttcaagcaagtggcaagttcaacaggattttgtgaccagcgcaggctgggcctccttctgcatgattctatccaaattccaagacagttgggtgaagttgcatcctttgggggcagtaacattgagccaagtgtccggagctgcttccaatttgctaataataagccagagatcgaagcggccctcttcctagactggatgagactggaaccccagtccatggtgtggctgcccgtcctgcacagagtggctgctgcagaaactgccaagcatcaggccaaatgtaacatctgcaaagagtgtccaatcattggattcaggtacaggagtctaaagcactttaattatgacatctgccaaagctgctttttttctggtcgagttgcaaaaggccataaaatgcactatcccatggtggaatattgcactccgactacatcaggagaagatgttcgagactttgccaaggtactaaaaaacaaatttcgaaccaaaaggtattttgcgaagcatccccgaatgggctacctgccagtgcagactgtcttagagggggacaacatggaaactcccgttactctgatcaacttctggccagtagattctgcgcctgcctcgtcccctcagctttcacacgatgatactcattcacgcattgaacattatgctagcaggctagcagaaatggaaaacagcaatggatcttatctaaatgatagcatctctcctaatgagagcatagatgatgaacatttgttaatccagcattactgccaaagtttgaaccaggactcccccctgagccagcctcgtagtcctgcccagatcttgatttccttagagagtgaggaaagaggggagctagagagaatcctagcagatcttgaggaagaaaacaggaatctgcaagcagaatatgaccgtctaaagcagcagcacgaacataaaggcctgtccccactgccgtcccctcctgaaatgatgcccacctctccccagagtccccgggatgctgagctcattgctgaggccaagctactgcgtcaacacaaaggccgcctggaagccaggatgcaaatcctggaagaccacaataaacagctggagtcacagttacacaggctaaggcagctgctggagcaaccccaggcagaggccaaagtgaatggcacaacggtgtcctctccttctacctctctacagaggtccgacagcagtcagcctatgctgctccgagtggttggcagtcaaacttcggactccatgggtgaggaagatcttctcagtcctccccaggacacaagcacagggttagaggaggtgatggagcaactcaacaactccttccctagttcaagaggacacaatgtaggaagtcttttccacatggcagatgatttgggcagagcgatggagtccttagtatcagtcatgacagatgaagaaggagcagaataaatgttttacaactcctgattcccgcatggtttttataatattcatacaacaaagaggattagacagtaagagtttacaagaaataaatctatatttttgtgaagggtagtggtattatactgtagatttcagtagtttctaagtctgttattgttttgttaacaatggcaggttttacacgtctatgcaattgtacaaaaaagttataagaaaactacatgtaaaatcttgatagctaaataacttgccatttctttatatggaacgcattttgggttgtttaaaaatttataacagttataaagaaagattgtaaactaaagtgtgctttataaaaaaaagttgtttataaaaacccctaaaaacaaaacaaacacacacacacacacatacacacacacacacaaaactttgaggcagcgcattgttttgcatccttttggcgtgatatccatatgaaattcatggctttttctttttttgcatattaaagataagacttcctctaccaccacaccaaatgactactacacactgctcatttgagaactgtcagctgagtggggcaggcttgagttttcatttcatatatctatatgtctataagtatataaatactatagttatatagataaagagatacgaatttctatagactgactttttccattttttaaatgttcatgtcacatcctaatagaaagaaattacttctagtcagtcatccaggcttacctgcttggtctagaatggatttttcccggagccggaagccaggaggaaactacaccacactaaaacattgtctacagctccagatgtttctcattttaaacaactttccactgacaacgaaagtaaagtaaagtattggatttttttaaagggaacatgtgaatgaatacacaggacttattatatcagagtgagtaatcggttggttggttgattgattgattgattgatacattcagcttcctgctgctagcaatgccacgatttagatttaatgatgcttcagtggaaatcaatcagaaggtattctgaccttgtgaacatcagaaggtattttttaactcccaagcagtagcaggacgatgatagggctggagggctatggattcccagcccatccctgtgaaggagtaggccactctttaagtgaaggattggatgattgttcataatacataaagttctctgtaattacaactaaattattatgccctcttctcacagtcaaaaggaactgggtggtttggtttttgttgcttttttagatttattgtcccatgtgggatgagtttttaaatgccacaagacataatttaaaataaataaactttgggaaaaggtgtaaaacagtagccccatcacatttgtgatactgacaggtatcaacccagaagcccatgaactgtgtttccatcctttgcatttctctgcgagtagttccacacaggtttgtaagtaagtaagaaagaaggcaaattgattcaaatgttacaaaaaaacccttcttggtggattagacaggttaaatatataaacaaacaaacaaaaattgctcaaaaaagaggagaaaagctcaagaggaaaagctaaggactggtaggaaaaagctttactctttcatgccattttatttctttttgatttttaaatcattcattcaatagataccaccgtgtgacctataattttgcaaatctgttacctctgacatcaagtgtaattagcttttggagagtgggctgacatcaagtgtaattagcttttggagagtgggttttgtccattattaataattaattaattaacatcaaacacggcttctcatgctatttctacctcactttggttttggggtgttcctgataattgtgcacacctgagttcacagcttcaccacttgtccattgcgttattttctttttcctttataattctttctttttccttcataattttcaaaagaaaacccaaagctctaaggtaacaaattaccaaattacatgaagatttggtttttgtcttgcatttttttcctttatgtgacgctggaccttttctttacccaaggatttttaaaactcagatttaaaacaaggggttactttacatcctactaagaagtttaagtaagtaagtttcattctaaaatcagaggtaaatagagtgcataaataattttgttttaatctttttgtttttcttttagacacattagctctggagtgagtctgtcataatatttgaacaaaaattgagagctttattgctgcattttaagcataattaatttggacattatttcgtgttgtgttctttataaccaccaagtattaaactgtaaatcataatgtaactgaagcataaacatcacatggcatgttttgtcattgttttcaggtactgagttcttacttgagtatcataatatattgtgttttaacaccaacactgtaacatttacgaattatttttttaaacttcagttttactgcattttcacaacatatcagacttcaccaaatatatgccttactattgtattatagtactgctttactgtgtatctcaataaagcacgcagttatgttacaaaaaa

SEQ ID NO: 466 - DNA, 4676 bp, Homo sapiens
  source 1..4676: mol_type = genomic DNA
gcagtgctttcagctgtgagcttgggcggcggcggcggcggcgctccactttcggggagcccggcggctctgggaagctcactcctccactcgtacccacactcgaccgcggagcccttgcagccatgagggaacagctcaaaggccacgagactcaaacaacttgctgggaccatcccaaaatgacagagctctaccagtctttagctgacctgaataatgtcagattctcagcttataggactgccatgaaactccgaagactgcagaaggccctttgcttggatctcttgagcctgtcagctgcatgtgatgccttggaccagcacaacctcaagcaaaatgaccagcccatggatatcctgcagattattaattgtttgaccactatttatgaccgcctggagcaagagcacaacaatttggtcaacgtccctctctgcgtggatatgtgtctgaactggctgctgaatgtttatgatacgggacgaacagggaggatccgtgtcctgtcttttaaaactggcatcatttccctgtgtaaagcacatttggaagacaagtacagataccttttcaagcaagtggcaagttcaacaggattttgtgaccagcgcaggctgggcctccttctgcatgattctatccaaattccaagacagttgggtgaagttgcatcctttgggggcagtaacattgagccaagtgtccggagctgcttccaatttgctaataataagccagagatcgaagcggccctcttcctagactggatgagactggaaccccagtccatggtgtggctgcccgtcctgcacagagtggctgctgcagaaactgccaagcatcaggccaaatgtaacatctgcaaagagtgtccaatcattggattcaggtacaggagtctaaagcactttaattatgacatctgccaaagctgctttttttctggtcgagttgcaaaaggccataaaatgcactatcccatggtggaatattgcactccgactacatcaggagaagatgttcgagactttgccaaggtactaaaaaacaaatttcgaaccaaaaggtattttgcgaagcatccccgaatgggctacctgccagtgcagactgtcttagagggggacaacatggaaactcccgttactctgatcaacttctggccagtagattctgcgcctgcctcgtcccctcagctttcacacgatgatactcattcacgcattgaacattatgctagcaggctagcagaaatggaaaacagcaatggatcttatctaaatgatagcatctctcctaatgagagcatagatgatgaacatttgttaatccagcattactgccaaagtttgaaccaggactcccccctgagccagcctcgtagtcctgcccagatcttgatttccttagagagtgaggaaagaggggagctagagagaatcctagcagatcttgaggaagaaaacaggaatctgcaagcagaatatgaccgtctaaagcagcagcacgaacataaaggcctgtccccactgccgtcccctcctgaaatgatgcccacctctccccagagtccccgggatgctgagctcattgctgaggccaagctactgcgtcaacacaaaggccgcctggaagccaggatgcaaatcctggaagaccacaataaacagctggagtcacagttacacaggctaaggcagctgctggagcaaccccaggcagaggccaaagtgaatggcacaacggtgtcctctccttctacctctctacagaggtccgacagcagtcagcctatgctgctccgagtggttggcagtcaaacttcggactccatgggtgaggaagatcttctcagtcctccccaggacacaagcacagggttagaggaggtgatggagcaactcaacaactccttccctagttcaagaggaagaaatacccctggaaagccaatgagagaggacacaatgtaggaagtcttttccacatggcagatgatttgggcagagcgatggagtccttagtatcagtcatgacagatgaagaaggagcagaataaatgttttacaactcctgattcccgcatggtttttataatattcatacaacaaagaggattagacagtaagagtttacaagaaataaatctatatttttgtgaagggtagtggtattatactgtagatttcagtagtttctaagtctgttattgttttgttaacaatggcaggttttacacgtctatgcaattgtacaaaaaagttataagaaaactacatgtaaaatcttgatagctaaataacttgccatttctttatatggaacgcattttgggttgtttaaaaatttataacagttataaagaaagattgtaaactaaagtgtgctttataaaaaaaagttgtttataaaaacccctaaaaacaaaacaaacacacacacacacacatacacacacacacacaaaactttgaggcagcgcattgttttgcatccttttggcgtgatatccatatgaaattcatggctttttctttttttgcatattaaagataagacttcctctaccaccacaccaaatgactactacacactgctcatttgagaactgtcagctgagtggggcaggcttgagttttcatttcatatatctatatgtctataagtatataaatactatagttatatagataaagagatacgaatttctatagactgactttttccattttttaaatgttcatgtcacatcctaatagaaagaaattacttctagtcagtcatccaggcttacctgcttggtctagaatggatttttcccggagccggaagccaggaggaaactacaccacactaaaacattgtctacagctccagatgtttctcattttaaacaactttccactgacaacgaaagtaaagtaaagtattggatttttttaaagggaacatgtgaatgaatacacaggacttattatatcagagtgagtaatcggttggttggttgattgattgattgattgatacattcagcttcctgctgctagcaatgccacgatttagatttaatgatgcttcagtggaaatcaatcagaaggtattctgaccttgtgaacatcagaaggtattttttaactcccaagcagtagcaggacgatgatagggctggagggctatggattcccagcccatccctgtgaaggagtaggccactctttaagtgaaggattggatgattgttcataatacataaagttctctgtaattacaactaaattattatgccctcttctcacagtcaaaaggaactgggtggtttggtttttgttgcttttttagatttattgtcccatgtgggatgagtttttaaatgccacaagacataatttaaaataaataaactttgggaaaaggtgtaaaacagtagccccatcacatttgtgatactgacaggtatcaacccagaagcccatgaactgtgtttccatcctttgcatttctctgcgagtagttccacacaggtttgtaagtaagtaagaaagaaggcaaattgattcaaatgttacaaaaaaacccttcttggtggattagacaggttaaatatataaacaaacaaacaaaaattgctcaaaaaagaggagaaaagctcaagaggaaaagctaaggactggtaggaaaaagctttactctttcatgccattttatttctttttgatttttaaatcattcattcaatagataccaccgtgtgacctataattttgcaaatctgttacctctgacatcaagtgtaattagcttttggagagtgggctgacatcaagtgtaattagcttttggagagtgggttttgtccattattaataattaattaattaacatcaaacacggcttctcatgctatttctacctcactttggttttggggtgttcctgataattgtgcacacctgagttcacagcttcaccacttgtccattgcgttattttctttttcctttataattctttctttttccttcataattttcaaaagaaaacccaaagctctaaggtaacaaattaccaaattacatgaagatttggtttttgtcttgcatttttttcctttatgtgacgctggaccttttctttacccaaggatttttaaaactcagatttaaaacaaggggttactttacatcctactaagaagtttaagtaagtaagtttcattctaaaatcagaggtaaatagagtgcataaataattttgttttaatctttttgtttttcttttagacacattagctctggagtgagtctgtcataatatttgaacaaaaattgagagctttattgctgcattttaagcataattaatttggacattatttcgtgttgtgttctttataaccaccaagtattaaactgtaaatcataatgtaactgaagcataaacatcacatggcatgttttgtcattgttttcaggtactgagttcttacttgagtatcataatatattgtgttttaacaccaacactgtaacatttacgaattatttttttaaacttcagttttactgcattttcacaacatatcagacttcaccaaatatatgccttactattgtattatagtactgctttactgtgtatctcaataaagcacgcagttatgttacaaaaaa

SEQ ID NO: 467 - DNA, 14000 bp, Homo sapiens
  source 1..14000: mol_type = genomic DNA
atgctgtctgtgaagctgaatctgtgagaacacctcactattcacggcaaccggagtggaagaaacaggtgcaaaaagattgtgtgtttgtctgcttttgtgaggctggtcagagattctgtgcctgctttatctgtgcttggctatgactctacctccaggtttaccataccccatagaatgtgtaagagaaaagtaccaacagggaaatcagcaaaaagctttcctatgaaggtgtgtagccagcctccgcagaatttgaaatgtctgaggtctcatctgatgaaagagaagatgttcaaaagaaaacattcacaaaatgggtaaatgcacaattttctaagtttgggaagcagcatattgagaacctcttcagtgacctacaggatgggaggcgcctcctagacctcctcgaaggcctgacagggcaaaaactgccaaaagaaaaaggatccacaagagttcatgccctgaacaatgtcaacaaggcactgcgggttttgcagaacaataatgttgatttagtgaatattggaagtactgacatcgtagatggaaatcataaactgactcttggtttgatttggaatataatcctccactggcaggtcaaaaatgtaatgaaaaatatcatggctggattgcaacaaaccaacagtgaaaagattctcctgagctgggtccgacaatcaactcgtaattatccacaggttaatgtaatcaacttcaccaccagctggtctgatggcctggctttgaatgctctcatccatagtcataggccagacctatttgactggaatagtgtggtttgccagcagtcagccacacaacgactggaacatgcattcaacatcgccagatatcaattaggcatagagaaactactcgatcctgaagatgttgataccacctatccagataagaagtccatcttaatgtacatcacatcactcttccaagttttgcctcaacaagtgagcattgaagccatccaggaagtggaaatgttgccaaggccacctaaagtgactaaagaagaacattttcagttacatcatcaaatgcactattctcaacagatcacggtcagtctagcacagggatatgagagaacttcttcccctaagcctcgattcaagagctatgcctacacacaggctgcttatgtcaccacctctgaccctacacggagcccatttccttcacagcatttggaagctcctgaagacaagtcatttggcagttcattgatggagagtgaagtaaacctggaccgttatcaaacagctttagaagaagtattatcgtggcttctttctgctgaggacacattgcaagcacaaggagagatttctaatgatgtggaagtggtgaaagaccagtttcatactcatgaggggtacatgatggatttgacagcccatcagggccgggttggtaatattctacaattgggaagtaagctgattggaacaggaaaattatcagaagatgaagaaactgaagtacaagagcagatgaatctcctaaattcaagatgggaatgcctcagggtagctagcatggaaaaacaaagcaatttacatagagttttaatggatctccagaatcagaaactgaaagagttgaatgactggctaacaaaaacagaagaaagaacaaggaaaatggaggaagagcctcttggacctgatcttgaagacctaaaacgccaagtacaacaacataaggtgcttcaagaagatctagaacaagaacaagtcagggtcaattctctcactcacatggtggtggtagttgatgaatctagtggagatcacgcaactgctgctttggaagaacaacttaaggtattgggagatcgatgggcaaacatctgtagatggacagaagaccgctgggttcttttacaagacatccttctcaaatggcaacgtcttactgaagaacagtgcctttttagtgcatggctttcagaaaaagaagatgcagtgaacaagattcacacaactggctttaaagatcaaaatgaaatgttatcaagtcttcaaaaactggccgttttaaaagcggatctagaaaagaaaaagcaatccatgggcaaactgtattcactcaaacaagatcttctttcaacactgaagaataagtcagtgacccagaagacggaagcatggctggataactttgcccggtgttgggataatttagtccaaaaacttgaaaagagtacagcacagatttcacaggctgtcaccaccactcagccatcactaacacagacaactgtaatggaaacagtaactacggtgaccacaagggaacagatcctggtaaagcatgctcaagaggaacttccaccaccacctccccaaaagaagaggcagattactgtggattctgaaattaggaaaaggttggatgttgatataactgaacttcacagctggattactcgctcagaagctgtgttgcagagtcctgaatttgcaatctttcggaaggaaggcaacttctcagacttaaaagaaaaagtcaatgccatagagcgagaaaaagctgagaagttcagaaaactgcaagatgccagcagatcagctcaggccctggtggaacagatggtgaatgagggtgttaatgcagatagcatcaaacaagcctcagaacaactgaacagccggtggatcgaattctgccagttgctaagtgagagacttaactggctggagtatcagaacaacatcatcgctttctataatcagctacaacaattggagcagatgacaactactgctgaaaactggttgaaaatccaacccaccaccccatcagagccaacagcaattaaaagtcagttaaaaatttgtaaggatgaagtcaaccggctatcaggtcttcaacctcaaattgaacgattaaaaattcaaagcatagccctgaaagagaaaggacaaggacccatgttcctggatgcagactttgtggcctttacaaatcattttaagcaagtcttttctgatgtgcaggccagagagaaagagctacagacaatttttgacactttgccaccaatgcgctatcaggagaccatgagtgccatcaggacatgggtccagcagtcagaaaccaaactctccatacctcaacttagtgtcaccgactatgaaatcatggagcagagactcggggaattgcaggctttacaaagttctctgcaagagcaacaaagtggcctatactatctcagcaccactgtgaaagagatgtcgaagaaagcgccctctgaaattagccggaaatatcaatcagaatttgaagaaattgagggacgctggaagaagctctcctcccagctggttgagcattgtcaaaagctagaggagcaaatgaataaactccgaaaaattcagaatcacatacaaaccctgaagaaatggatggctgaagttgatgtttttctgaaggaggaatggcctgcccttggggattcagaaattctaaaaaagcagctgaaacagtgcagacttttagtcagtgatattcagacaattcagcccagtctaaacagtgtcaatgaaggtgggcagaagataaagaatgaagcagagccagagtttgcttcgagacttgagacagaactcaaagaacttaacactcagtgggatcacatgtgccaacaggtctatgccagaaaggaggccttgaagggaggtttggagaaaactgtaagcctccagaaagatctatcagagatgcacgaatggatgacacaagctgaagaagagtatcttgagagagattttgaatataaaactccagatgaattacagaaagcagttgaagagatgaagagagctaaagaagaggcccaacaaaaagaagcgaaagtgaaactccttactgagtctgtaaatagtgtcatagctcaagctccacctgtagcacaagaggccttaaaaaaggaacttgaaactctaaccaccaactaccagtggctctgcactaggctgaatgggaaatgcaagactttggaagaagtttgggcatgttggcatgagttattgtcatacttggagaaagcaaacaagtggctaaatgaagtagaatttaaacttaaaaccactgaaaacattcctggcggagctgaggaaatctctgaggtgctagattcacttgaaaatttgatgcgacattcagaggataacccaaatcagattcgcatattggcacagaccctaacagatggcggagtcatggatgagctaatcaatgaggaacttgagacatttaattctcgttggagggaactacatgaagaggctgtaaggaggcaaaagttgcttgaacagagcatccagtctgcccaggagactgaaaaatccttacacttaatccaggagtccctcacattcattgacaagcagttggcagcttatattgcagacaaggtggacgcagctcaaatgcctcaggaagcccagaaaatccaatctgatttgacaagtcatgagatcagtttagaagaaatgaagaaacataatcaggggaaggaggctgcccaaagagtcctgtctcagattgatgttgcacagaaaaaattacaagatgtctccatgaagtttcgattattccagaaaccagccaattttgagcagcgtctacaagaaagtaagatgattttagatgaagtgaagatgcacttgcctgcattggaaacaaagagtgtggaacaggaagtagtacagtcacagctaaatcattgtgtgaacttgtataaaagtctgagtgaagtgaagtctgaagtggaaatggtgataaagactggacgtcagattgtacagaaaaagcagacggaaaatcccaaagaacttgatgaaagagtaacagctttgaaattgcattataatgagctgggagcaaaggtaacagaaagaaagcaacagttggagaaatgcttgaaattgtcccgtaagatgcgaaaggaaatgaatgtcttgacagaatggctggcagctacagatatggaattgacaaagagatcagcagttgaaggaatgcctagtaatttggattctgaagttgcctggggaaaggctactcaaaaagagattgagaaacagaaggtgcacctgaagagtatcacagaggtaggagaggccttgaaaacagttttgggcaagaaggagacgttggtggaagataaactcagtcttctgaatagtaactggatagctgtcacctcccgagcagaagagtggttaaatcttttgttggaataccagaaacacatggaaacttttgaccagaatgtggaccacatcacaaagtggatcattcaggctgacacacttttggatgaatcagagaaaaagaaaccccagcaaaaagaagacgtgcttaagcgtttaaaggcagaactgaatgacatacgcccaaaggtggactctacacgtgaccaagcagcaaacttgatggcaaaccgcggtgaccactgcaggaaattagtagagccccaaatctcagagctcaaccatcgatttgcagccatttcacacagaattaagactggaaaggcctccattcctttgaaggaattggagcagtttaactcagatatacaaaaattgcttgaaccactggaggctgaaattcagcagggggtgaatctgaaagaggaagacttcaataaagatatgaatgaagacaatgagggtactgtaaaagaattgttgcaaagaggagacaacttacaacaaagaatcacagatgagagaaagcgagaggaaataaagataaaacagcagctgttacagacaaaacataatgctctcaaggatttgaggtctcaaagaagaaaaaaggctctagaaatttctcatcagtggtatcagtacaagaggcaggctgatgatctcctgaaatgcttggatgacattgaaaaaaaattagccagcctacctgagcccagagatgaaaggaaaataaaggaaattgatcgggaattgcagaagaagaaagaggagctgaatgcagtgcgtaggcaagctgagggcttgtctgaggatggggccgcaatggcagtggagccaactcagatccagctcagcaagcgctggcgggaaattgagagcaaatttgctcagtttcgaagactcaactttgcacaaattcacactgtccgtgaagaaacgatgatggtgatgactgaagacatgcctttggaaatttcttatgtgccttctacttatttgactgaaatcactcatgtctcacaagccctattagaagtggaacaacttctcaatgctcctgacctctgtgctaaggactttgaagatctctttaagcaagaggagtctctgaagaatataaaagatagtctacaacaaagctcaggtcggattgacattattcatagcaagaagacagcagcattgcaaagtgcaacgcctgtggaaagggtgaagctacaggaagctctctcccagcttgatttccaatgggaaaaagttaacaaaatgtacaaggaccgacaagggcgatttgacagatctgttgagaaatggcggcgttttcattatgatataaagatatttaatcagtggctaacagaagctgaacagtttctcagaaagacacaaattcctgagaattgggaacatgctaaatacaaatggtatcttaaggaactccaggatggcattgggcagcggcaaactgttgtcagaacattgaatgcaactggggaagaaataattcagcaatcctcaaaaacagatgccagtattctacaggaaaaattgggaagcctgaatctgcggtggcaggaggtctgcaaacagctgtcagacagaaaaaagaggctagaagaacaaaagaatatcttgtcagaatttcaaagagatttaaatgaatttgttttatggttggaggaagcagataacattgctagtatcccacttgaacctggaaaagagcagcaactaaaagaaaagcttgagcaagtcaagttactggtggaagagttgcccctgcgccagggaattctcaaacaattaaatgaaactggaggacccgtgcttgtaagtgctcccataagcccagaagagcaagataaacttgaaaataagctcaagcagacaaatctccagtggataaaggtttccagagctttacctgagaaacaaggagaaattgaagctcaaataaaagaccttgggcagcttgaaaaaaagcttgaagaccttgaagagcagttaaatcatctgctgctgtggttatctcctattaggaatcagttggaaatttataaccaaccaaaccaagaaggaccatttgacgttcaggaaactgaaatagcagttcaagctaaacaaccggatgtggaagagattttgtctaaagggcagcatttgtacaaggaaaaaccagccactcagccagtgaagaggaagttagaagatctgagctctgagtggaaggcggtaaaccgtttacttcaagagctgagggcaaagcagcctgacctagctcctggactgaccactattggagcctctcctactcagactgttactctggtgacacaacctgtggttactaaggaaactgccatctccaaactagaaatgccatcttccttgatgttggaggtacctgctctggcagatttcaaccgggcttggacagaacttaccgactggctttctctgcttgatcaagttataaaatcacagagggtgatggtgggtgaccttgaggatatcaacgagatgatcatcaagcagaaggcaacaatgcaggatttggaacagaggcgtccccagttggaagaactcattaccgctgcccaaaatttgaaaaacaagaccagcaatcaagaggctagaacaatcattacggatcgaattgaaagaattcagaatcagtgggatgaagtacaagaacaccttcagaaccggaggcaacagttgaatgaaatgttaaaggattcaacacaatggctggaagctaaggaagaagctgagcaggtcttaggacaggccagagccaagcttgagtcatggaaggagggtccctatacagtagatgcaatccaaaagaaaatcacagaaaccaagcagttggccaaagacctccgccagtggcagacaaatgtagatgtggcaaatgacttggccctgaaacttctccgggattattctgcagatgataccagaaaagtccacatgataacagagaatatcaatgcctcttggagaagcattcataaaagggtgagtgagcgagaggctgctttggaagaaactcatagattactgcaacagttccccctggacctggaaaagtttcttgcctggcttacagaagctgaaacaactgccaatgtcctacaggatgctacccgtaaggaaaggctcctagaagactccaagggagtaaaagagctgatgaaacaatggcaagacctccaaggtgaaattgaagctcacacagatgtttatcacaacctggatgaaaacagccaaaaaatcctgagatccctggaaggttccgatgatgcagtcctgttacaaagacgtttggataacatgaacttcaagtggagtgaacttcggaaaaagtctctcaacattaggtcccatttggaagccagttctgaccagtggaagcgtctgcacctttctctgcaggaacttctggtgtggctacagctgaaagatgatgaattaagccggcaggcacctattggaggcgactttccagcagttcagaagcagaacgatgtacatagggccttcaagagggaattgaaaactaaagaacctgtaatcatgagtactcttgagactgtacgaatatttctgacagagcagcctttggaaggactagagaaactctaccaggagcccagagagctgcctcctgaggagagagcccagaatgtcactcggcttctacgaaagcaggctgaggaggtcaatactgagtgggaaaaattgaacctgcactccgctgactggcagagaaaaatagatgagacccttgaaagactccaggaacttcaagaggccacggatgagctggacctcaagctgcgccaagctgaggtgatcaagggatcctggcagcccgtgggcgatctcctcattgactctctccaagatcacctcgagaaagtcaaggcacttcgaggagaaattgcgcctctgaaagagaacgtgagccacgtcaatgaccttgctcgccagcttaccactttgggcattcagctctcaccgtataacctcagcactctggaagacctgaacaccagatggaagcttctgcaggtggccgtcgaggaccgagtcaggcagctgcatgaagcccacagggactttggtccagcatctcagcactttctttccacgtctgtccagggtccctgggagagagccatctcgccaaacaaagtgccctactatatcaaccacgagactcaaacaacttgctgggaccatcccaaaatgacagagctctaccagtctttagctgacctgaataatgtcagattctcagcttataggactgccatgaaactccgaagactgcagaaggccctttgcttggatctcttgagcctgtcagctgcatgtgatgccttggaccagcacaacctcaagcaaaatgaccagcccatggatatcctgcagattattaattgtttgaccactatttatgaccgcctggagcaagagcacaacaatttggtcaacgtccctctctgcgtggatatgtgtctgaactggctgctgaatgtttatgatacgggacgaacagggaggatccgtgtcctgtcttttaaaactggcatcatttccctgtgtaaagcacatttggaagacaagtacagataccttttcaagcaagtggcaagttcaacaggattttgtgaccagcgcaggctgggcctccttctgcatgattctatccaaattccaagacagttgggtgaagttgcatcctttgggggcagtaacattgagccaagtgtccggagctgcttccaatttgctaataataagccagagatcgaagcggccctcttcctagactggatgagactggaaccccagtccatggtgtggctgcccgtcctgcacagagtggctgctgcagaaactgccaagcatcaggccaaatgtaacatctgcaaagagtgtccaatcattggattcaggtacaggagtctaaagcactttaattatgacatctgccaaagctgctttttttctggtcgagttgcaaaaggccataaaatgcactatcccatggtggaatattgcactccgactacatcaggagaagatgttcgagactttgccaaggtactaaaaaacaaatttcgaaccaaaaggtattttgcgaagcatccccgaatgggctacctgccagtgcagactgtcttagagggggacaacatggaaactcccgttactctgatcaacttctggccagtagattctgcgcctgcctcgtcccctcagctttcacacgatgatactcattcacgcattgaacattatgctagcaggctagcagaaatggaaaacagcaatggatcttatctaaatgatagcatctctcctaatgagagcatagatgatgaacatttgttaatccagcattactgccaaagtttgaaccaggactcccccctgagccagcctcgtagtcctgcccagatcttgatttccttagagagtgaggaaagaggggagctagagagaatcctagcagatcttgaggaagaaaacaggaatctgcaagcagaatatgaccgtctaaagcagcagcacgaacataaaggcctgtccccactgccgtcccctcctgaaatgatgcccacctctccccagagtccccgggatgctgagctcattgctgaggccaagctactgcgtcaacacaaaggccgcctggaagccaggatgcaaatcctggaagaccacaataaacagctggagtcacagttacacaggctaaggcagctgctggagcaaccccaggcagaggccaaagtgaatggcacaacggtgtcctctccttctacctctctacagaggtccgacagcagtcagcctatgctgctccgagtggttggcagtcaaacttcggactccatgggtgaggaagatcttctcagtcctccccaggacacaagcacagggttagaggaggtgatggagcaactcaacaactccttccctagttcaagaggaagaaatacccctggaaagccaatgagagaggacacaatgtaggaagtcttttccacatggcagatgatttgggcagagcgatggagtccttagtatcagtcatgacagatgaagaaggagcagaataaatgttttacaactcctgattcccgcatggtttttataatattcatacaacaaagaggattagacagtaagagtttacaagaaataaatctatatttttgtgaagggtagtggtattatactgtagatttcagtagtttctaagtctgttattgttttgttaacaatggcaggttttacacgtctatgcaattgtacaaaaaagttataagaaaactacatgtaaaatcttgatagctaaataacttgccatttctttatatggaacgcattttgggttgtttaaaaatttataacagttataaagaaagattgtaaactaaagtgtgctttataaaaaaaagttgtttataaaaacccctaaaaacaaaacaaacacacacacacacacatacacacacacacacaaaactttgaggcagcgcattgttttgcatccttttggcgtgatatccatatgaaattcatggctttttctttttttgcatattaaagataagacttcctctaccaccacaccaaatgactactacacactgctcatttgagaactgtcagctgagtggggcaggcttgagttttcatttcatatatctatatgtctataagtatataaatactatagttatatagataaagagatacgaatttctatagactgactttttccattttttaaatgttcatgtcacatcctaatagaaagaaattacttctagtcagtcatccaggcttacctgcttggtctagaatggatttttcccggagccggaagccaggaggaaactacaccacactaaaacattgtctacagctccagatgtttctcattttaaacaactttccactgacaacgaaagtaaagtaaagtattggatttttttaaagggaacatgtgaatgaatacacaggacttattatatcagagtgagtaatcggttggttggttgattgattgattgattgatacattcagcttcctgctgctagcaatgccacgatttagatttaatgatgcttcagtggaaatcaatcagaaggtattctgaccttgtgaacatcagaaggtattttttaactcccaagcagtagcaggacgatgatagggctggagggctatggattcccagcccatccctgtgaaggagtaggccactctttaagtgaaggattggatgattgttcataatacataaagttctctgtaattacaactaaattattatgccctcttctcacagtcaaaaggaactgggtggtttggtttttgttgcttttttagatttattgtcccatgtgggatgagtttttaaatgccacaagacataatttaaaataaataaactttgggaaaaggtgtaaaacagtagccccatcacatttgtgatactgacaggtatcaacccagaagcccatgaactgtgtttccatcctttgcatttctctgcgagtagttccacacaggtttgtaagtaagtaagaaagaaggcaaattgattcaaatgttacaaaaaaacccttcttggtggattagacaggttaaatatataaacaaacaaacaaaaattgctcaaaaaagaggagaaaagctcaagaggaaaagctaaggactggtaggaaaaagctttactctttcatgccattttatttctttttgatttttaaatcattcattcaatagataccaccgtgtgacctataattttgcaaatctgttacctctgacatcaagtgtaattagcttttggagagtgggctgacatcaagtgtaattagcttttggagagtgggttttgtccattattaataattaattaattaacatcaaacacggcttctcatgctatttctacctcactttggttttggggtgttcctgataattgtgcacacctgagttcacagcttcaccacttgtccattgcgttattttctttttcctttataattctttctttttccttcataattttcaaaagaaaacccaaagctctaaggtaacaaattaccaaattacatgaagatttggtttttgtcttgcatttttttcctttatgtgacgctggaccttttctttacccaaggatttttaaaactcagatttaaaacaaggggttactttacatcctactaagaagtttaagtaagtaagtttcattctaaaatcagaggtaaatagagtgcataaataattttgttttaatctttttgtttttcttttagacacattagctctggagtgagtctgtcataatatttgaacaaaaattgagagctttattgctgcattttaagcataattaatttggacattatttcgtgttgtgttctttataaccaccaagtattaaactgtaaatcataatgtaactgaagcataaacatcacatggcatgttttgtcattgttttcaggtactgagttcttacttgagtatcataatatattgtgttttaacaccaacactgtaacatttacgaattatttttttaaacttcagttttactgcattttcacaacatatcagacttcaccaaatatatgccttactattgtattatagtactgctttactgtgtatctcaataaagcacgcagttatgttac

SEQ ID NO: 468 - DNA, 14083 bp, Homo sapiens
  source 1..14083: mol_type = genomic DNA
tgctgtctgtgaagctgaatctgtgagaacacctcactattcacggcaaccggagtggaagaaacaggtgcaaaaagattgtgtgtttgtctgcttttgtgaggctggtcagagattctgtgcctgctttatctgtgcttggctatgactctacctccaggtttaccataccccatagaatgtgtaagagaaaagtaccaacagggaaatcagcaaaaagctttcctatgaaggtgtgtagccagcctccgcagaatttgaaatgtctgaggtctcatctggtgagtaaaagctgcagataaatgcaacagccattcagaagaatgataaattccacaagcattcagaagcaggcttccctaaagatgaaagagaagatgttcaaaagaaaacattcacaaaatgggtaaatgcacaattttctaagtttgggaagcagcatattgagaacctcttcagtgacctacaggatgggaggcgcctcctagacctcctcgaaggcctgacagggcaaaaactgccaaaagaaaaaggatccacaagagttcatgccctgaacaatgtcaacaaggcactgcgggttttgcagaacaataatgttgatttagtgaatattggaagtactgacatcgtagatggaaatcataaactgactcttggtttgatttggaatataatcctccactggcaggtcaaaaatgtaatgaaaaatatcatggctggattgcaacaaaccaacagtgaaaagattctcctgagctgggtccgacaatcaactcgtaattatccacaggttaatgtaatcaacttcaccaccagctggtctgatggcctggctttgaatgctctcatccatagtcataggccagacctatttgactggaatagtgtggtttgccagcagtcagccacacaacgactggaacatgcattcaacatcgccagatatcaattaggcatagagaaactactcgatcctgaagatgttgataccacctatccagataagaagtccatcttaatgtacatcacatcactcttccaagttttgcctcaacaagtgagcattgaagccatccaggaagtggaaatgttgccaaggccacctaaagtgactaaagaagaacattttcagttacatcatcaaatgcactattctcaacagatcacggtcagtctagcacagggatatgagagaacttcttcccctaagcctcgattcaagagctatgcctacacacaggctgcttatgtcaccacctctgaccctacacggagcccatttccttcacagcatttggaagctcctgaagacaagtcatttggcagttcattgatggagagtgaagtaaacctggaccgttatcaaacagctttagaagaagtattatcgtggcttctttctgctgaggacacattgcaagcacaaggagagatttctaatgatgtggaagtggtgaaagaccagtttcatactcatgaggggtacatgatggatttgacagcccatcagggccgggttggtaatattctacaattgggaagtaagctgattggaacaggaaaattatcagaagatgaagaaactgaagtacaagagcagatgaatctcctaaattcaagatgggaatgcctcagggtagctagcatggaaaaacaaagcaatttacatagagttttaatggatctccagaatcagaaactgaaagagttgaatgactggctaacaaaaacagaagaaagaacaaggaaaatggaggaagagcctcttggacctgatcttgaagacctaaaacgccaagtacaacaacataaggtgcttcaagaagatctagaacaagaacaagtcagggtcaattctctcactcacatggtggtggtagttgatgaatctagtggagatcacgcaactgctgctttggaagaacaacttaaggtattgggagatcgatgggcaaacatctgtagatggacagaagaccgctgggttcttttacaagacatccttctcaaatggcaacgtcttactgaagaacagtgcctttttagtgcatggctttcagaaaaagaagatgcagtgaacaagattcacacaactggctttaaagatcaaaatgaaatgttatcaagtcttcaaaaactggccgttttaaaagcggatctagaaaagaaaaagcaatccatgggcaaactgtattcactcaaacaagatcttctttcaacactgaagaataagtcagtgacccagaagacggaagcatggctggataactttgcccggtgttgggataatttagtccaaaaacttgaaaagagtacagcacagatttcacaggctgtcaccaccactcagccatcactaacacagacaactgtaatggaaacagtaactacggtgaccacaagggaacagatcctggtaaagcatgctcaagaggaacttccaccaccacctccccaaaagaagaggcagattactgtggattctgaaattaggaaaaggttggatgttgatataactgaacttcacagctggattactcgctcagaagctgtgttgcagagtcctgaatttgcaatctttcggaaggaaggcaacttctcagacttaaaagaaaaagtcaatgccatagagcgagaaaaagctgagaagttcagaaaactgcaagatgccagcagatcagctcaggccctggtggaacagatggtgaatgagggtgttaatgcagatagcatcaaacaagcctcagaacaactgaacagccggtggatcgaattctgccagttgctaagtgagagacttaactggctggagtatcagaacaacatcatcgctttctataatcagctacaacaattggagcagatgacaactactgctgaaaactggttgaaaatccaacccaccaccccatcagagccaacagcaattaaaagtcagttaaaaatttgtaaggatgaagtcaaccggctatcaggtcttcaacctcaaattgaacgattaaaaattcaaagcatagccctgaaagagaaaggacaaggacccatgttcctggatgcagactttgtggcctttacaaatcattttaagcaagtcttttctgatgtgcaggccagagagaaagagctacagacaatttttgacactttgccaccaatgcgctatcaggagaccatgagtgccatcaggacatgggtccagcagtcagaaaccaaactctccatacctcaacttagtgtcaccgactatgaaatcatggagcagagactcggggaattgcaggctttacaaagttctctgcaagagcaacaaagtggcctatactatctcagcaccactgtgaaagagatgtcgaagaaagcgccctctgaaattagccggaaatatcaatcagaatttgaagaaattgagggacgctggaagaagctctcctcccagctggttgagcattgtcaaaagctagaggagcaaatgaataaactccgaaaaattcagaatcacatacaaaccctgaagaaatggatggctgaagttgatgtttttctgaaggaggaatggcctgcccttggggattcagaaattctaaaaaagcagctgaaacagtgcagacttttagtcagtgatattcagacaattcagcccagtctaaacagtgtcaatgaaggtgggcagaagataaagaatgaagcagagccagagtttgcttcgagacttgagacagaactcaaagaacttaacactcagtgggatcacatgtgccaacaggtctatgccagaaaggaggccttgaagggaggtttggagaaaactgtaagcctccagaaagatctatcagagatgcacgaatggatgacacaagctgaagaagagtatcttgagagagattttgaatataaaactccagatgaattacagaaagcagttgaagagatgaagagagctaaagaagaggcccaacaaaaagaagcgaaagtgaaactccttactgagtctgtaaatagtgtcatagctcaagctccacctgtagcacaagaggccttaaaaaaggaacttgaaactctaaccaccaactaccagtggctctgcactaggctgaatgggaaatgcaagactttggaagaagtttgggcatgttggcatgagttattgtcatacttggagaaagcaaacaagtggctaaatgaagtagaatttaaacttaaaaccactgaaaacattcctggcggagctgaggaaatctctgaggtgctagattcacttgaaaatttgatgcgacattcagaggataacccaaatcagattcgcatattggcacagaccctaacagatggcggagtcatggatgagctaatcaatgaggaacttgagacatttaattctcgttggagggaactacatgaagaggctgtaaggaggcaaaagttgcttgaacagagcatccagtctgcccaggagactgaaaaatccttacacttaatccaggagtccctcacattcattgacaagcagttggcagcttatattgcagacaaggtggacgcagctcaaatgcctcaggaagcccagaaaatccaatctgatttgacaagtcatgagatcagtttagaagaaatgaagaaacataatcaggggaaggaggctgcccaaagagtcctgtctcagattgatgttgcacagaaaaaattacaagatgtctccatgaagtttcgattattccagaaaccagccaattttgagcagcgtctacaagaaagtaagatgattttagatgaagtgaagatgcacttgcctgcattggaaacaaagagtgtggaacaggaagtagtacagtcacagctaaatcattgtgtgaacttgtataaaagtctgagtgaagtgaagtctgaagtggaaatggtgataaagactggacgtcagattgtacagaaaaagcagacggaaaatcccaaagaacttgatgaaagagtaacagctttgaaattgcattataatgagctgggagcaaaggtaacagaaagaaagcaacagttggagaaatgcttgaaattgtcccgtaagatgcgaaaggaaatgaatgtcttgacagaatggctggcagctacagatatggaattgacaaagagatcagcagttgaaggaatgcctagtaatttggattctgaagttgcctggggaaaggctactcaaaaagagattgagaaacagaaggtgcacctgaagagtatcacagaggtaggagaggccttgaaaacagttttgggcaagaaggagacgttggtggaagataaactcagtcttctgaatagtaactggatagctgtcacctcccgagcagaagagtggttaaatcttttgttggaataccagaaacacatggaaacttttgaccagaatgtggaccacatcacaaagtggatcattcaggctgacacacttttggatgaatcagagaaaaagaaaccccagcaaaaagaagacgtgcttaagcgtttaaaggcagaactgaatgacatacgcccaaaggtggactctacacgtgaccaagcagcaaacttgatggcaaaccgcggtgaccactgcaggaaattagtagagccccaaatctcagagctcaaccatcgatttgcagccatttcacacagaattaagactggaaaggcctccattcctttgaaggaattggagcagtttaactcagatatacaaaaattgcttgaaccactggaggctgaaattcagcagggggtgaatctgaaagaggaagacttcaataaagatatgaatgaagacaatgagggtactgtaaaagaattgttgcaaagaggagacaacttacaacaaagaatcacagatgagagaaagcgagaggaaataaagataaaacagcagctgttacagacaaaacataatgctctcaaggatttgaggtctcaaagaagaaaaaaggctctagaaatttctcatcagtggtatcagtacaagaggcaggctgatgatctcctgaaatgcttggatgacattgaaaaaaaattagccagcctacctgagcccagagatgaaaggaaaataaaggaaattgatcgggaattgcagaagaagaaagaggagctgaatgcagtgcgtaggcaagctgagggcttgtctgaggatggggccgcaatggcagtggagccaactcagatccagctcagcaagcgctggcgggaaattgagagcaaatttgctcagtttcgaagactcaactttgcacaaattcacactgtccgtgaagaaacgatgatggtgatgactgaagacatgcctttggaaatttcttatgtgccttctacttatttgactgaaatcactcatgtctcacaagccctattagaagtggaacaacttctcaatgctcctgacctctgtgctaaggactttgaagatctctttaagcaagaggagtctctgaagaatataaaagatagtctacaacaaagctcaggtcggattgacattattcatagcaagaagacagcagcattgcaaagtgcaacgcctgtggaaagggtgaagctacaggaagctctctcccagcttgatttccaatgggaaaaagttaacaaaatgtacaaggaccgacaagggcgatttgacagatctgttgagaaatggcggcgttttcattatgatataaagatatttaatcagtggctaacagaagctgaacagtttctcagaaagacacaaattcctgagaattgggaacatgctaaatacaaatggtatcttaaggaactccaggatggcattgggcagcggcaaactgttgtcagaacattgaatgcaactggggaagaaataattcagcaatcctcaaaaacagatgccagtattctacaggaaaaattgggaagcctgaatctgcggtggcaggaggtctgcaaacagctgtcagacagaaaaaagaggctagaagaacaaaagaatatcttgtcagaatttcaaagagatttaaatgaatttgttttatggttggaggaagcagataacattgctagtatcccacttgaacctggaaaagagcagcaactaaaagaaaagcttgagcaagtcaagttactggtggaagagttgcccctgcgccagggaattctcaaacaattaaatgaaactggaggacccgtgcttgtaagtgctcccataagcccagaagagcaagataaacttgaaaataagctcaagcagacaaatctccagtggataaaggtttccagagctttacctgagaaacaaggagaaattgaagctcaaataaaagaccttgggcagcttgaaaaaaagcttgaagaccttgaagagcagttaaatcatctgctgctgtggttatctcctattaggaatcagttggaaatttataaccaaccaaaccaagaaggaccatttgacgttcaggaaactgaaatagcagttcaagctaaacaaccggatgtggaagagattttgtctaaagggcagcatttgtacaaggaaaaaccagccactcagccagtgaagaggaagttagaagatctgagctctgagtggaaggcggtaaaccgtttacttcaagagctgagggcaaagcagcctgacctagctcctggactgaccactattggagcctctcctactcagactgttactctggtgacacaacctgtggttactaaggaaactgccatctccaaactagaaatgccatcttccttgatgttggaggtacctgctctggcagatttcaaccgggcttggacagaacttaccgactggctttctctgcttgatcaagttataaaatcacagagggtgatggtgggtgaccttgaggatatcaacgagatgatcatcaagcagaaggcaacaatgcaggatttggaacagaggcgtccccagttggaagaactcattaccgctgcccaaaatttgaaaaacaagaccagcaatcaagaggctagaacaatcattacggatcgaattgaaagaattcagaatcagtgggatgaagtacaagaacaccttcagaaccggaggcaacagttgaatgaaatgttaaaggattcaacacaatggctggaagctaaggaagaagctgagcaggtcttaggacaggccagagccaagcttgagtcatggaaggagggtccctatacagtagatgcaatccaaaagaaaatcacagaaaccaagcagttggccaaagacctccgccagtggcagacaaatgtagatgtggcaaatgacttggccctgaaacttctccgggattattctgcagatgataccagaaaagtccacatgataacagagaatatcaatgcctcttggagaagcattcataaaagggtgagtgagcgagaggctgctttggaagaaactcatagattactgcaacagttccccctggacctggaaaagtttcttgcctggcttacagaagctgaaacaactgccaatgtcctacaggatgctacccgtaaggaaaggctcctagaagactccaagggagtaaaagagctgatgaaacaatggcaagacctccaaggtgaaattgaagctcacacagatgtttatcacaacctggatgaaaacagccaaaaaatcctgagatccctggaaggttccgatgatgcagtcctgttacaaagacgtttggataacatgaacttcaagtggagtgaacttcggaaaaagtctctcaacattaggtcccatttggaagccagttctgaccagtggaagcgtctgcacctttctctgcaggaacttctggtgtggctacagctgaaagatgatgaattaagccggcaggcacctattggaggcgactttccagcagttcagaagcagaacgatgtacatagggccttcaagagggaattgaaaactaaagaacctgtaatcatgagtactcttgagactgtacgaatatttctgacagagcagcctttggaaggactagagaaactctaccaggagcccagagagctgcctcctgaggagagagcccagaatgtcactcggcttctacgaaagcaggctgaggaggtcaatactgagtgggaaaaattgaacctgcactccgctgactggcagagaaaaatagatgagacccttgaaagactccaggaacttcaagaggccacggatgagctggacctcaagctgcgccaagctgaggtgatcaagggatcctggcagcccgtgggcgatctcctcattgactctctccaagatcacctcgagaaagtcaaggcacttcgaggagaaattgcgcctctgaaagagaacgtgagccacgtcaatgaccttgctcgccagcttaccactttgggcattcagctctcaccgtataacctcagcactctggaagacctgaacaccagatggaagcttctgcaggtggccgtcgaggaccgagtcaggcagctgcatgaagcccacagggactttggtccagcatctcagcactttctttccacgtctgtccagggtccctgggagagagccatctcgccaaacaaagtgccctactatatcaaccacgagactcaaacaacttgctgggaccatcccaaaatgacagagctctaccagtctttagctgacctgaataatgtcagattctcagcttataggactgccatgaaactccgaagactgcagaaggccctttgcttggatctcttgagcctgtcagctgcatgtgatgccttggaccagcacaacctcaagcaaaatgaccagcccatggatatcctgcagattattaattgtttgaccactatttatgaccgcctggagcaagagcacaacaatttggtcaacgtccctctctgcgtggatatgtgtctgaactggctgctgaatgtttatgatacgggacgaacagggaggatccgtgtcctgtcttttaaaactggcatcatttccctgtgtaaagcacatttggaagacaagtacagataccttttcaagcaagtggcaagttcaacaggattttgtgaccagcgcaggctgggcctccttctgcatgattctatccaaattccaagacagttgggtgaagttgcatcctttgggggcagtaacattgagccaagtgtccggagctgcttccaatttgctaataataagccagagatcgaagcggccctcttcctagactggatgagactggaaccccagtccatggtgtggctgcccgtcctgcacagagtggctgctgcagaaactgccaagcatcaggccaaatgtaacatctgcaaagagtgtccaatcattggattcaggtacaggagtctaaagcactttaattatgacatctgccaaagctgctttttttctggtcgagttgcaaaaggccataaaatgcactatcccatggtggaatattgcactccgactacatcaggagaagatgttcgagactttgccaaggtactaaaaaacaaatttcgaaccaaaaggtattttgcgaagcatccccgaatgggctacctgccagtgcagactgtcttagagggggacaacatggaaactcccgttactctgatcaacttctggccagtagattctgcgcctgcctcgtcccctcagctttcacacgatgatactcattcacgcattgaacattatgctagcaggctagcagaaatggaaaacagcaatggatcttatctaaatgatagcatctctcctaatgagagcatagatgatgaacatttgttaatccagcattactgccaaagtttgaaccaggactcccccctgagccagcctcgtagtcctgcccagatcttgatttccttagagagtgaggaaagaggggagctagagagaatcctagcagatcttgaggaagaaaacaggaatctgcaagcagaatatgaccgtctaaagcagcagcacgaacataaaggcctgtccccactgccgtcccctcctgaaatgatgcccacctctccccagagtccccgggatgctgagctcattgctgaggccaagctactgcgtcaacacaaaggccgcctggaagccaggatgcaaatcctggaagaccacaataaacagctggagtcacagttacacaggctaaggcagctgctggagcaaccccaggcagaggccaaagtgaatggcacaacggtgtcctctccttctacctctctacagaggtccgacagcagtcagcctatgctgctccgagtggttggcagtcaaacttcggactccatgggtgaggaagatcttctcagtcctccccaggacacaagcacagggttagaggaggtgatggagcaactcaacaactccttccctagttcaagaggaagaaatacccctggaaagccaatgagagaggacacaatgtaggaagtcttttccacatggcagatgatttgggcagagcgatggagtccttagtatcagtcatgacagatgaagaaggagcagaataaatgttttacaactcctgattcccgcatggtttttataatattcatacaacaaagaggattagacagtaagagtttacaagaaataaatctatatttttgtgaagggtagtggtattatactgtagatttcagtagtttctaagtctgttattgttttgttaacaatggcaggttttacacgtctatgcaattgtacaaaaaagttataagaaaactacatgtaaaatcttgatagctaaataacttgccatttctttatatggaacgcattttgggttgtttaaaaatttataacagttataaagaaagattgtaaactaaagtgtgctttataaaaaaaagttgtttataaaaacccctaaaaacaaaacaaacacacacacacacacatacacacacacacacaaaactttgaggcagcgcattgttttgcatccttttggcgtgatatccatatgaaattcatggctttttctttttttgcatattaaagataagacttcctctaccaccacaccaaatgactactacacactgctcatttgagaactgtcagctgagtggggcaggcttgagttttcatttcatatatctatatgtctataagtatataaatactatagttatatagataaagagatacgaatttctatagactgactttttccattttttaaatgttcatgtcacatcctaatagaaagaaattacttctagtcagtcatccaggcttacctgcttggtctagaatggatttttcccggagccggaagccaggaggaaactacaccacactaaaacattgtctacagctccagatgtttctcattttaaacaactttccactgacaacgaaagtaaagtaaagtattggatttttttaaagggaacatgtgaatgaatacacaggacttattatatcagagtgagtaatcggttggttggttgattgattgattgattgatacattcagcttcctgctgctagcaatgccacgatttagatttaatgatgcttcagtggaaatcaatcagaaggtattctgaccttgtgaacatcagaaggtattttttaactcccaagcagtagcaggacgatgatagggctggagggctatggattcccagcccatccctgtgaaggagtaggccactctttaagtgaaggattggatgattgttcataatacataaagttctctgtaattacaactaaattattatgccctcttctcacagtcaaaaggaactgggtggtttggtttttgttgcttttttagatttattgtcccatgtgggatgagtttttaaatgccacaagacataatttaaaataaataaactttgggaaaaggtgtaaaacagtagccccatcacatttgtgatactgacaggtatcaacccagaagcccatgaactgtgtttccatcctttgcatttctctgcgagtagttccacacaggtttgtaagtaagtaagaaagaaggcaaattgattcaaatgttacaaaaaaacccttcttggtggattagacaggttaaatatataaacaaacaaacaaaaattgctcaaaaaagaggagaaaagctcaagaggaaaagctaaggactggtaggaaaaagctttactctttcatgccattttatttctttttgatttttaaatcattcattcaatagataccaccgtgtgacctataattttgcaaatctgttacctctgacatcaagtgtaattagcttttggagagtgggctgacatcaagtgtaattagcttttggagagtgggttttgtccattattaataattaattaattaacatcaaacacggcttctcatgctatttctacctcactttggttttggggtgttcctgataattgtgcacacctgagttcacagcttcaccacttgtccattgcgttattttctttttcctttataattctttctttttccttcataattttcaaaagaaaacccaaagctctaaggtaacaaattaccaaattacatgaagatttggtttttgtcttgcatttttttcctttatgtgacgctggaccttttctttacccaaggatttttaaaactcagatttaaaacaaggggttactttacatcctactaagaagtttaagtaagtaagtttcattctaaaatcagaggtaaatagagtgcataaataattttgttttaatctttttgtttttcttttagacacattagctctggagtgagtctgtcataatatttgaacaaaaattgagagctttattgctgcattttaagcataattaatttggacattatttcgtgttgtgttctttataaccaccaagtattaaactgtaaatcataatgtaactgaagcataaacatcacatggcatgttttgtcattgttttcaggtactgagttcttacttgagtatcataatatattgtgttttaacaccaacactgtaacatttacgaattatttttttaaacttcagttttactgcattttcacaacatatcagacttcaccaaatatatgccttactattgtattatagtactgctttactgtgtatctcaataaagcacgcagttatgttac

SEQ ID NO: 469 - DNA, 1618 bp, Homo sapiens
  source 1..1618: mol_type = genomic DNA
gcagtgctttcagctgtgagcttgggcggcggcggcggcggcgctccactttcggggagcccggcggctctgggaagctcactcctccactcgtacccacactcgaccgcggagcccttgcagccatgagggaacagctcaaaggccacgagactcaaacaacttgctgggaccatcccaaaatgacagagctctaccagtctttagctgacctgaataatgtcagattctcagcttataggactgccatgaaactccgaagactgcagaaggccctttgcttggatctcttgagcctgtcagctgcatgtgatgccttggaccagcacaacctcaagcaaaatgaccagcccatggatatcctgcagattattaattgtttgaccactatttatgaccgcctggagcaagagcacaacaatttggtcaacgtccctctctgcgtggatatgtgtctgaactggctgctgaatgtttatgatacgggacgaacagggaggatccgtgtcctgtcttttaaaactggcatcatttccctgtgtaaagcacatttggaagacaagtacagataccttttcaagcaagtggcaagttcaacaggattttgtgaccagcgcaggctgggcctccttctgcatgattctatccaaattccaagacagttgggtgaagttgcatcctttgggggcagtaacattgagccaagtgtccggagctgcttccaatttgctaataataagccagagatcgaagcggccctcttcctagactggatgagactggaaccccagtccatggtgtggctgcccgtcctgcacagagtggctgctgcagaaactgccaagcatcaggccaaatgtaacatctgcaaagagtgtccaatcattggattcaggtacaggagtctaaagcactttaattatgacatctgccaaagctgctttttttctggtcgagttgcaaaaggccataaaatgcactatcccatggtggaatattgcactccgactacatcaggagaagatgttcgagactttgccaaggtactaaaaaacaaatttcgaaccaaaaggtattttgcgaagcatccccgaatgggctacctgccagtgcagactgtcttagagggggacaacatggaaacgtgagtagtagcaaaagcagaacacactcttgtttgatgtatatttgaactcctctcagctgaacaccctccttcactcccaaatgcaaacagtctcttctatttctttctttttatttacattagctgaaaagagaaaaataagctgatgtccagttgccactttcccacgtcacttgacaatttctttttccaaaagttaaactttatctcacagggggaaaaaaaaaaaaaaaccacaacacaatacagccactaattgccttacaagccttataagaaatatgggactgtttacaaatgagtgattccagtatttcattttgattttcctctctcacaaatcagtaaatgtgtgtctttttgtatctcattgtgtggtcatatctagtcacttgtttctactcaaaagaaaatatagtcacaggaaactacttcacagtaagtagtaatgattctcaagatcaaagggga

SEQ ID NO: 470 - DNA, 10595 bp, Homo sapiens
  source 1..10595: mol_type = genomic DNA
atcagttactgtgttgactcactcagtgttgggatcactcactttccccctacaggactcagatctgggaggcaattaccttcggagaaaaacgaataggaaaaactgaagtgttactttttttaaagctgctgaagtttgttggtttctcattgtttttaagcctactggagcaataaagtttgaagaacttttaccaggttttttttatcgctgccttgatatacacttttcaaaatgctttggtgggaagaagtagaggactgttatgaaagagaagatgttcaaaagaaaacattcacaaaatgggtaaatgcacaattttctaagtttgggaagcagcatattgagaacctcttcagtgacctacaggatgggaggcgcctcctagacctcctcgaaggcctgacagggcaaaaactgccaaaagaaaaaggatccacaagagttcatgccctgaacaatgtcaacaaggcactgcgggttttgcagaacaataatgttgatttagtgaatattggaagtactgacatcgtagatggaaatcataaactgactcttggtttgatttggaatataatcctccactggcaggtcaaaaatgtaatgaaaaatatcatggctggattgcaacaaaccaacagtgaaaagattctcctgagctgggtccgacaatcaactcgtaattatccacaggttaatgtaatcaacttcaccaccagctggtctgatggcctggctttgaatgctctcatccatagtcataggccagacctatttgactggaatagtgtggtttgccagcagtcagccacacaacgactggaacatgcattcaacatcgccagatatcaattaggcatagagaaactactcgatcctgaagatgttgataccacctatccagataagaagtccatcttaatgtacatcacatcactcttccaagttttgcctcaacaagtgagcattgaagccatccaggaagtggaaatgttgccaaggccacctaaagtgactaaagaagaacattttcagttacatcatcaaatgcactattctcaacagatcacggtcagtctagcacagggatatgagagaacttcttcccctaagcctcgattcaagagctatgcctacacacaggctgcttatgtcaccacctctgaccctacacggagcccatttccttcacagcatttggaagctcctgaagacaagtcatttggcagttcattgatggagagtgaagtaaacctggaccgttatcaaacagctttagaagaagtattatcgtggcttctttctgctgaggacacattgcaagcacaaggagagatttctaatgatgtggaagtggtgaaagaccagtttcatactcatgaggggtacatgatggatttgacagcccatcagggccgggttggtaatattctacaattgggaagtaagctgattggaacaggaaaattatcagaagatgaagaaactgaagtacaagagcagatgaatctcctaaattcaagatgggaatgcctcagggtagctagcatggaaaaacaaagcaatttacatagagttttaatggatctccagaatcagaaactgaaagagttgaatgactggctaacaaaaacagaagaaagaacaaggaaaatggaggaagagcctcttggacctgatcttgaagacctaaaacgccaagtacaacaacataaggtgcttcaagaagatctagaacaagaacaagtcagggtcaattctctcactcacatggtggtggtagttgatgaatctagtggagatcacgcaactgctgctttggaagaacaacttaaggtattgggagatcgatgggcaaacatctgtagatggacagaagaccgctgggttcttttacaagacatccttctcaaatggcaacgtcttactgaagaacagtgcctttttagtgcatggctttcagaaaaagaagatgcagtgaacaagattcacacaactggctttaaagatcaaaatgaaatgttatcaagtcttcaaaaactggccgttttaaaagcggatctagaaaagaaaaagcaatccatgggcaaactgtattcactcaaacaagatcttctttcaacactgaagaataagtcagtgacccagaagacggaagcatggctggataactttgcccggtgttgggataatttagtccaaaaacttgaaaagagtacagcacagatttcacaggctgtcaccaccactcagccatcactaacacagacaactgtaatggaaacagtaactacggtgaccacaagggaacagatcctggtaaagcatgctcaagaggaacttccaccaccacctccccaaaagaagaggcagattactgtggattctgaaattaggaaaaggttggatgttgatataactgaacttcacagctggattactcgctcagaagctgtgttgcagagtcctgaatttgcaatctttcggaaggaaggcaacttctcagacttaaaagaaaaagtcaatgccatagagcgagaaaaagctgagaagttcagaaaactgcaagatgccagcagatcagctcaggccctggtggaacagatggtgaatgagggtgttaatgcagatagcatcaaacaagcctcagaacaactgaacagccggtggatcgaattctgccagttgctaagtgagagacttaactggctggagtatcagaacaacatcatcgctttctataatcagctacaacaattggagcagatgacaactactgctgaaaactggttgaaaatccaacccaccaccccatcagagccaacagcaattaaaagtcagttaaaaatttgtaaggatgaagtcaaccggctatcagatcttcaacctcaaattgaacgattaaaaattcaaagcatagccctgaaagagaaaggacaaggacccatgttcctggatgcagactttgtggcctttacaaatcattttaagcaagtcttttctgatgtgcaggccagagagaaagagctacagacaatttttgacactttgccaccaatgcgctatcaggagaccatgagtgccatcaggacatgggtccagcagtcagaaaccaaactctccatacctcaacttagtgtcaccgactatgaaatcatggagcagagactcggggaattgcaggctttacaaagttctctgcaagagcaacaaagtggcctatactatctcagcaccactgtgaaagagatgtcgaagaaagcgccctctgaaattagccggaaatatcaatcagaatttgaagaaattgagggacgctggaagaagctctcctcccagctggttgagcattgtcaaaagctagaggagcaaatgaataaactccgaaaaattcagaatcacatacaaaccctgaagaaatggatggctgaagttgatgtttttctgaaggaggaatggcctgcccttggggattcagaaattctaaaaaagcagctgaaacagtgcagacttttagtcagtgatattcagacaattcagcccagtctaaacagtgtcaatgaaggtgggcagaagataaagaatgaagcagagccagagtttgcttcgagacttgagacagaactcaaagaacttaacactcagtgggatcacatgtgccaacaggtctatgccagaaaggaggccttgaagggaggtttggagaaaactgtaagcctccagaaagatctatcagagatgcacgaatggatgacacaagctgaagaagagtatcttgagagagattttgaatataaaactccagatgaattacagaaagcagttgaagagatgaagagagctaaagaagaggcccaacaaaaagaagcgaaagtgaaactccttactgagtctgtaaatagtgtcatagctcaagctccacctgtagcacaagaggccttaaaaaaggaacttgaaactctaaccaccaactaccagtggctctgcactaggctgaatgggaaatgcaagactttggaagaagtttgggcatgttggcatgagttattgtcatacttggagaaagcaaacaagtggctaaatgaagtagaatttaaacttaaaaccactgaaaacattcctggcggagctgaggaaatctctgaggtgctagattcacttgaaaatttgatgcgacattcagaggataacccaaatcagattcgcatattggcacagaccctaacagatggcggagtcatggatgagctaatcaatgaggaacttgagacatttaattctcgttggagggaactacatgaagaggctgtaaggaggcaaaagttgcttgaacagagcatccagtctgcccaggagactgaaaaatccttacacttaatccaggagtccctcacattcattgacaagcagttggcagcttatattgcagacaaggtggacgcagctcaaatgcctcaggaagcccagaaaatccaatctgatttgacaagtcatgagatcagtttagaagaaatgaagaaacataatcaggggaaggaggctgcccaaagagtcctgtctcagattgatgttgcacagaaaaaattacaagatgtctccatgaagtttcgattattccagaaaccagccaattttgagcagcgtctacaagaaagtaagatgattttagatgaagtgaagatgcacttgcctgcattggaaacaaagagtgtggaacaggaagtagtacagtcacagctaaatcattgtgtgaacttgtataaaagtctgagtgaagtgaagtctgaagtggaaatggtgataaagactggacgtcagattgtacagaaaaagcagacggaaaatcccaaagaacttgatgaaagagtaacagctttgaaattgcattataatgagctgggagcaaaggtaacagaaagaaagcaacagttggagaaatgcttgaaattgtcccgtaagatgcgaaaggaaatgaatgtcttgacagaatggctggcagctacagatatggaattgacaaagagatcagcagttgaaggaatgcctagtaatttggattctgaagttgcctggggaaaggctactcaaaaagagattgagaaacagaaggtgcacctgaagagtatcacagaggtaggagaggccttgaaaacagttttgggcaagaaggagacgttggtggaagataaactcagtcttctgaatagtaactggatagctgtcacctcccgagcagaagagtggttaaatcttttgttggaataccagaaacacatggaaacttttgaccagaatgtggaccacatcacaaagtggatcattcaggctgacacacttttggatgaatcagagaaaaagaaaccccagcaaaaagaagacgtgcttaagcgtttaaaggcagaactgaatgacatacgcccaaaggtggactctacacgtgaccaagcagcaaacttgatggcaaaccgcggtgaccactgcaggaaattagtagagccccaaatctcagagctcaaccatcgatttgcagccatttcacacagaattaagactggaaaggcctccattcctttgaaggaattggagcagtttaactcagatatacaaaaattgcttgaaccactggaggctgaaattcagcagggggtgaatctgaaagaggaagacttcaataaagatatgaatgaagacaatgagggtactgtaaaagaattgttgcaaagaggagacaacttacaacaaagaatcacagatgagagaaagcgagaggaaataaagataaaacagcagctgttacagacaaaacataatgctctcaaggatttgaggtctcaaagaagaaaaaaggctctagaaatttctcatcagtggtatcagtacaagaggcaggctgatgatctcctgaaatgcttggatgacattgaaaaaaaattagccagcctacctgagcccagagatgaaaggaaaataaaggaaattgatcgggaattgcagaagaagaaagaggagctgaatgcagtgcgtaggcaagctgagggcttgtctgaggatggggccgcaatggcagtggagccaactcagatccagctcagcaagcgctggcgggaaattgagagcaaatttgctcagtttcgaagactcaactttgcacaaattcacactgtccgtgaagaaacgatgatggtgatgactgaagacatgcctttggaaatttcttatgtgccttctacttatttgactgaaatcactcatgtctcacaagccctattagaagtggaacaacttctcaatgctcctgacctctgtgctaaggactttgaagatctctttaagcaagaggagtctctgaagaatataaaagatagtctacaacaaagctcaggtcggattgacattattcatagcaagaagacagcagcattgcaaagtgcaacgcctgtggaaagggtgaagctacaggaagctctctcccagcttgatttccaatgggaaaaagttaacaaaatgtacaaggaccgacaagggcgatttgacagatctgttgagaaatggcggcgttttcattatgatataaagatatttaatcagtggctaacagaagctgaacagtttctcagaaagacacaaattcctgagaattgggaacatgctaaatacaaatggtatcttaaggaactccaggatggcattgggcagcggcaaactgttgtcagaacattgaatgcaactggggaagaaataattcagcaatcctcaaaaacagatgccagtattctacaggaaaaattgggaagcctgaatctgcggtggcaggaggtctgcaaacagctgtcagacagaaaaaagaggctagaagaacaaaagaatatcttgtcagaatttcaaagagatttaaatgaatttgttttatggttggaggaagcagataacattgctagtatcccacttgaacctggaaaagagcagcaactaaaagaaaagcttgagcaagtcaagttactggtggaagagttgcccctgcgccagggaattctcaaacaattaaatgaaactggaggacccgtgcttgtaagtgctcccataagcccagaagagcaagataaacttgaaaataagctcaagcagacaaatctccagtggataaaggtttccagagctttacctgagaaacaaggagaaattgaagctcaaataaaagaccttgggcagcttgaaaaaaagcttgaagaccttgaagagcagttaaatcatctgctgctgtggttatctcctattaggaatcagttggaaatttataaccaaccaaaccaagaaggaccatttgacgttaaggaaactgaaatagcagttcaagctaaacaaccggatgtggaagagattttgtctaaagggcagcatttgtacaaggaaaaaccagccactcagccagtgaagaggaagttagaagatctgagctctgagtggaaggcggtaaaccgtttacttcaagagctgagggcaaagcagcctgacctagctcctggactgaccactattggagcctctcctactcagactgttactctggtgacacaacctgtggttactaaggaaactgccatctccaaactagaaatgccatcttccttgatgttggaggtacctgctctggcagatttcaaccgggcttggacagaacttaccgactggctttctctgcttgatcaagttataaaatcacagagggtgatggtgggtgaccttgaggatatcaacgagatgatcatcaagcagaaggcaacaatgcaggatttggaacagaggcgtccccagttggaagaactcattaccgctgcccaaaatttgaaaaacaagaccagcaatcaagaggctagaacaatcattacggatcgaattgaaagaattcagaatcagtgggatgaagtacaagaacaccttcagaaccggaggcaacagttgaatgaaatgttaaaggattcaacacaatggctggaagctaaggaagaagctgagcaggtcttaggacaggccagagccaagcttgagtcatggaaggagggtccctatacagtagatgcaatccaaaagaaaatcacagaaaccaagcagttggccaaagacctccgccagtggcagacaaatgtagatgtggcaaatgacttggccctgaaacttctccgggattattctgcagatgataccagaaaagtccacatgataacagagaatatcaatgcctcttggagaagcattcataaaagggtgagtgagcgagaggctgctttggaagaaactcatagattactgcaacagttccccctggacctggaaaagtttcttgcctggcttacagaagctgaaacaactgccaatgtcctacaggatgctacccgtaaggaaaggctcctagaagactccaagggagtaaaagagctgatgaaacaatggcaagacctccaaggtgaaattgaagctcacacagatgtttatcacaacctggatgaaaacagccaaaaaatcctgagatccctggaaggttccgatgatgcagtcctgttacaaagacgtttggataacatgaacttcaagtggagtgaacttcggaaaaagtctctcaacattaggtcccatttggaagccagttctgaccagtggaagcgtctgcacctttctctgcaggaacttctggtgtggctacagctgaaagatgatgaattaagccggcaggcacctattggaggcgactttccagcagttcagaagcagaacgatgtacatagggccttcaagagggaattgaaaactaaagaacctgtaatcatgagtactcttgagactgtacgaatatttctgacagagcagcctttggaaggactagagaaactctaccaggagcccagagagctgcctcctgaggagagagcccagaatgtcactcggcttctacgaaagcaggctgaggaggtcaatactgagtgggaaaaattgaacctgcactccgctgactggcagagaaaaatagatgagacccttgaaagactccgggaacttcaagaggccacggatgagctggacctcaagctgcgccaagctgaggtgatcaagggatcctggcagcccgtgggcgatctcctcattgactctctccaagatcacctcgagaaagtcaaggcacttcgaggagaaattgcgcctctgaaagagaacgtgagccacgtcaatgaccttgctcgccagcttaccactttgggcattcagctctcaccgtataacctcagcactctggaagacctgaacaccagatggaagcttctgcaggtggccgtcgaggaccgagtcaggcagctgcatgaagcccacagggactttggtccagcatctcagcactttctttccacgtctgtccagggtccctgggagagagccatctcgccaaacaaagtgccctactatatcaaccacgagactcaaacaacttgctgggaccatcccaaaatgacagagctctaccagtctttagctgacctgaataatgtcagattctcagcttataggactgccatgaaactccgaagactgcagaaggccctttgcttggatctcttgagcctgtcagctgcatgtgatgccttggaccagcacaacctcaagcaaaatgaccagcccatggatatcctgcagattattaattgtttgaccactatttatgaccgcctggagcaagagcacaacaatttggtcaacgtccctctctgcgtggatatgtgtctgaactggctgctgaatgtttatgatacgggacgaacagggaggatccgtgtcctgtcttttaaaactggcatcatttccctgtgtaaagcacatttggaagacaagtacagataccttttcaagcaagtggcaagttcaacaggattttgtgaccagcgcaggctgggcctccttctgcatgattctatccaaattccaagacagttgggtgaagttgcatcctttgggggcagtaacattgagccaagtgtccggagctgcttccaattttcccaatctctggaaaccacagctctgttttctgttcctgtaattttgccttttcctgaactggattttaaaggattgtaggaggcagtagtggaagagctaactttatatcttgttcttttacataatgcgccctgatccacacttgggaaagtatattccatggtacctatagacagatatatgtgctttaccatgtatatgtgaaacttttctaatttaactttcctgttaaattagaactcggtagcataaattaatactgttgagtatacttagggatttgcatagatttaaaattgtgcatatgttccctagggccatggcgttaattggtttattagtcaggtggagtgcagagcctgaggtcaggacagttgtccttgaacatggaaatgaagagtggataatcaccatgtgttattgtttgggctgattttatctttaatgggtgattcagagtcctgattaatatttagagcagtgactgctggcctcctacctgctcattatcttcagaactttaaataaaatacttgatttctacccaa

SEQ ID NO: 471 - DNA, 10835 bp, Homo sapiens
  source 1..10835: mol_type = genomic DNA
atcagttactgtgttgactcactcagtgttgggatcactcactttccccctacaggactcagatctgggaggcaattaccttcggagaaaaacgaataggaaaaactgaagtgttactttttttaaagctgctgaagtttgttggtttctcattgtttttaagcctactggagcaataaagtttgaagaacttttaccaggttttttttatcgctgccttgatatacacttttcaaaatgctttggtgggaagaagtagaggactgttatgaaagagaagatgttcaaaagaaaacattcacaaaatgggtaaatgcacaattttctaagtttgggaagcagcatattgagaacctcttcagtgacctacaggatgggaggcgcctcctagacctcctcgaaggcctgacagggcaaaaactgccaaaagaaaaaggatccacaagagttcatgccctgaacaatgtcaacaaggcactgcgggttttgcagaacaataatgttgatttagtgaatattggaagtactgacatcgtagatggaaatcataaactgactcttggtttgatttggaatataatcctccactggcaggtcaaaaatgtaatgaaaaatatcatggctggattgcaacaaaccaacagtgaaaagattctcctgagctgggtccgacaatcaactcgtaattatccacaggttaatgtaatcaacttcaccaccagctggtctgatggcctggctttgaatgctctcatccatagtcataggccagacctatttgactggaatagtgtggtttgccagcagtcagccacacaacgactggaacatgcattcaacatcgccagatatcaattaggcatagagaaactactcgatcctgaagatgttgataccacctatccagataagaagtccatcttaatgtacatcacatcactcttccaagttttgcctcaacaagtgagcattgaagccatccaggaagtggaaatgttgccaaggccacctaaagtgactaaagaagaacattttcagttacatcatcaaatgcactattctcaacagatcacggtcagtctagcacagggatatgagagaacttcttcccctaagcctcgattcaagagctatgcctacacacaggctgcttatgtcaccacctctgaccctacacggagcccatttccttcacagcatttggaagctcctgaagacaagtcatttggcagttcattgatggagagtgaagtaaacctggaccgttatcaaacagctttagaagaagtattatcgtggcttctttctgctgaggacacattgcaagcacaaggagagatttctaatgatgtggaagtggtgaaagaccagtttcatactcatgaggggtacatgatggatttgacagcccatcagggccgggttggtaatattctacaattgggaagtaagctgattggaacaggaaaattatcagaagatgaagaaactgaagtacaagagcagatgaatctcctaaattcaagatgggaatgcctcagggtagctagcatggaaaaacaaagcaatttacatagagttttaatggatctccagaatcagaaactgaaagagttgaatgactggctaacaaaaacagaagaaagaacaaggaaaatggaggaagagcctcttggacctgatcttgaagacctaaaacgccaagtacaacaacataaggtgcttcaagaagatctagaacaagaacaagtcagggtcaattctctcactcacatggtggtggtagttgatgaatctagtggagatcacgcaactgctgctttggaagaacaacttaaggtattgggagatcgatgggcaaacatctgtagatggacagaagaccgctgggttcttttacaagacatccttctcaaatggcaacgtcttactgaagaacagtgcctttttagtgcatggctttcagaaaaagaagatgcagtgaacaagattcacacaactggctttaaagatcaaaatgaaatgttatcaagtcttcaaaaactggccgttttaaaagcggatctagaaaagaaaaagcaatccatgggcaaactgtattcactcaaacaagatcttctttcaacactgaagaataagtcagtgacccagaagacggaagcatggctggataactttgcccggtgttgggataatttagtccaaaaacttgaaaagagtacagcacagatttcacaggctgtcaccaccactcagccatcactaacacagacaactgtaatggaaacagtaactacggtgaccacaagggaacagatcctggtaaagcatgctcaagaggaacttccaccaccacctccccaaaagaagaggcagattactgtggattctgaaattaggaaaaggttggatgttgatataactgaacttcacagctggattactcgctcagaagctgtgttgcagagtcctgaatttgcaatctttcggaaggaaggcaacttctcagacttaaaagaaaaagtcaatgccatagagcgagaaaaagctgagaagttcagaaaactgcaagatgccagcagatcagctcaggccctggtggaacagatggtgaatgagggtgttaatgcagatagcatcaaacaagcctcagaacaactgaacagccggtggatcgaattctgccagttgctaagtgagagacttaactggctggagtatcagaacaacatcatcgctttctataatcagctacaacaattggagcagatgacaactactgctgaaaactggttgaaaatccaacccaccaccccatcagagccaacagcaattaaaagtcagttaaaaatttgtaaggatgaagtcaaccggctatcagatcttcaacctcaaattgaacgattaaaaattcaaagcatagccctgaaagagaaaggacaaggacccatgttcctggatgcagactttgtggcctttacaaatcattttaagcaagtcttttctgatgtgcaggccagagagaaagagctacagacaatttttgacactttgccaccaatgcgctatcaggagaccatgagtgccatcaggacatgggtccagcagtcagaaaccaaactctccatacctcaacttagtgtcaccgactatgaaatcatggagcagagactcggggaattgcaggctttacaaagttctctgcaagagcaacaaagtggcctatactatctcagcaccactgtgaaagagatgtcgaagaaagcgccctctgaaattagccggaaatatcaatcagaatttgaagaaattgagggacgctggaagaagctctcctcccagctggttgagcattgtcaaaagctagaggagcaaatgaataaactccgaaaaattcagaatcacatacaaaccctgaagaaatggatggctgaagttgatgtttttctgaaggaggaatggcctgcccttggggattcagaaattctaaaaaagcagctgaaacagtgcagacttttagtcagtgatattcagacaattcagcccagtctaaacagtgtcaatgaaggtgggcagaagataaagaatgaagcagagccagagtttgcttcgagacttgagacagaactcaaagaacttaacactcagtgggatcacatgtgccaacaggtctatgccagaaaggaggccttgaagggaggtttggagaaaactgtaagcctccagaaagatctatcagagatgcacgaatggatgacacaagctgaagaagagtatcttgagagagattttgaatataaaactccagatgaattacagaaagcagttgaagagatgaagagagctaaagaagaggcccaacaaaaagaagcgaaagtgaaactccttactgagtctgtaaatagtgtcatagctcaagctccacctgtagcacaagaggccttaaaaaaggaacttgaaactctaaccaccaactaccagtggctctgcactaggctgaatgggaaatgcaagactttggaagaagtttgggcatgttggcatgagttattgtcatacttggagaaagcaaacaagtggctaaatgaagtagaatttaaacttaaaaccactgaaaacattcctggcggagctgaggaaatctctgaggtgctagattcacttgaaaatttgatgcgacattcagaggataacccaaatcagattcgcatattggcacagaccctaacagatggcggagtcatggatgagctaatcaatgaggaacttgagacatttaattctcgttggagggaactacatgaagaggctgtaaggaggcaaaagttgcttgaacagagcatccagtctgcccaggagactgaaaaatccttacacttaatccaggagtccctcacattcattgacaagcagttggcagcttatattgcagacaaggtggacgcagctcaaatgcctcaggaagcccagaaaatccaatctgatttgacaagtcatgagatcagtttagaagaaatgaagaaacataatcaggggaaggaggctgcccaaagagtcctgtctcagattgatgttgcacagaaaaaattacaagatgtctccatgaagtttcgattattccagaaaccagccaattttgagcagcgtctacaagaaagtaagatgattttagatgaagtgaagatgcacttgcctgcattggaaacaaagagtgtggaacaggaagtagtacagtcacagctaaatcattgtgtgaacttgtataaaagtctgagtgaagtgaagtctgaagtggaaatggtgataaagactggacgtcagattgtacagaaaaagcagacggaaaatcccaaagaacttgatgaaagagtaacagctttgaaattgcattataatgagctgggagcaaaggtaacagaaagaaagcaacagttggagaaatgcttgaaattgtcccgtaagatgcgaaaggaaatgaatgtcttgacagaatggctggcagctacagatatggaattgacaaagagatcagcagttgaaggaatgcctagtaatttggattctgaagttgcctggggaaaggctactcaaaaagagattgagaaacagaaggtgcacctgaagagtatcacagaggtaggagaggccttgaaaacagttttgggcaagaaggagacgttggtggaagataaactcagtcttctgaatagtaactggatagctgtcacctcccgagcagaagagtggttaaatcttttgttggaataccagaaacacatggaaacttttgaccagaatgtggaccacatcacaaagtggatcattcaggctgacacacttttggatgaatcagagaaaaagaaaccccagcaaaaagaagacgtgcttaagcgtttaaaggcagaactgaatgacatacgcccaaaggtggactctacacgtgaccaagcagcaaacttgatggcaaaccgcggtgaccactgcaggaaattagtagagccccaaatctcagagctcaaccatcgatttgcagccatttcacacagaattaagactggaaaggcctccattcctttgaaggaattggagcagtttaactcagatatacaaaaattgcttgaaccactggaggctgaaattcagcagggggtgaatctgaaagaggaagacttcaataaagatatgaatgaagacaatgagggtactgtaaaagaattgttgcaaagaggagacaacttacaacaaagaatcacagatgagagaaagcgagaggaaataaagataaaacagcagctgttacagacaaaacataatgctctcaaggatttgaggtctcaaagaagaaaaaaggctctagaaatttctcatcagtggtatcagtacaagaggcaggctgatgatctcctgaaatgcttggatgacattgaaaaaaaattagccagcctacctgagcccagagatgaaaggaaaataaaggaaattgatcgggaattgcagaagaagaaagaggagctgaatgcagtgcgtaggcaagctgagggcttgtctgaggatggggccgcaatggcagtggagccaactcagatccagctcagcaagcgctggcgggaaattgagagcaaatttgctcagtttcgaagactcaactttgcacaaattcacactgtccgtgaagaaacgatgatggtgatgactgaagacatgcctttggaaatttcttatgtgccttctacttatttgactgaaatcactcatgtctcacaagccctattagaagtggaacaacttctcaatgctcctgacctctgtgctaaggactttgaagatctctttaagcaagaggagtctctgaagaatataaaagatagtctacaacaaagctcaggtcggattgacattattcatagcaagaagacagcagcattgcaaagtgcaacgcctgtggaaagggtgaagctacaggaagctctctcccagcttgatttccaatgggaaaaagttaacaaaatgtacaaggaccgacaagggcgatttgacagatctgttgagaaatggcggcgttttcattatgatataaagatatttaatcagtggctaacagaagctgaacagtttctcagaaagacacaaattcctgagaattgggaacatgctaaatacaaatggtatcttaagagaacaggagacagaggacttatccttcttgatgatgtcatttgaaaagaatggctttcaggtccttgagtgagagacacttctgatttccaagagctacatgttcacaattgtaagcccttttgagtaaatgttctaagaaacggaggtaagagtcctatcaacagatgtgtgttggctagaacaaacattaaattttcctggcagcactgagctttctcaagcaggcacttaagggaaggctagggtcatcctagggacatggccttctggggctagaaaccatactagagtttagtcaagtcttagtgcaagggtttggacagagttgttaagtgctgagagttctgtatttctcactgtcacaaaggaagatcagaagctcctgatacttttttcatcagtacaattgaatatataaatcctatacacaaaaataaactaagcttatacaagcatattggtcaaggaatgttgctggccttattaattagatagcccagttaaaagaagaattttttaatataattaatgttaaagtaggatgatagtatataaaacgtgtctactgtcctgaatacaaactaaactgtttggtttagcatttacctcaagatctcttaatatcccccaaagggtccctaaaaccacaacttatctttgtgctcatgaagtagagaagagacagttaatagacatttctagctgatagactgttgtagagcagagaacgctctgtgtttttgaaaattaaacatatgaatttgcccctcttcccctattaaggaagaagagtttcttaattgtgcgaacacatcaagtgaactattcaattagatttttgtgacccagggtataaacatctggttaaggttacatatttcaaaggaacaaaacactagaaactcttggttttaaatctcatggctggaggataatttgcagcagagatttatctggcaagcatacagaattgctgagactgttctaaagatgtaagtgtgggtgtttgtgtcgtgaaaatagctgtttacatctattaagtggataccgatggttgaaagtgccgtctatgtcaagtttttaccaaatcaacttttgcctcactgtgtcagaccattttacctaatcaacttggactgctaatgtcctttcccctggcaccactatctgtctcttttgcaaagcacagaaacggcatgcatgattgtagtttataaaacacatgtaccaatgtggtctacagcttctgttgagttcgagagggtcagtttctgtaatctcttctggcacagagtcaagaacagcttcactttcctcctgctacctctctacccgtaagtgtgaacccatcactttgctaacactcaggaaggggattacacaaaatagagcaggagccctctgacctgaatatgcatctgagccctagccatagagcttctgattcagtagatctgggatggggcctaaatatttgcatttttaagtgtataagtgatgctgatgctgctggttccaggaccacattttaagaaatatcgataaaggtggagaattaaactgcagctcagaagacctgagttcttgccccagcttgacttttacaatctagcaaatggataaaactcgcaggacttcagttctcttcatctacacagtgagtggttagattggctttgtaatttaaaattaaacagggtttgattctgattcactacacaaggttccaaagaaggaatgatatctcctttcatttcttcactttgtcttctgtccctaggtaatcttatctatgttcctgatttaacctaactaatgtttctgcaaagcttctaatatttacatctccagccctgaaactctcatttgaatgctagtcttatatacatacccccctgcctaattgacatctccacttaaatgtatcagaggcaactcagactcaacaaggaccaaactgaatgttcgaccttgtccttcaaacccgatacacatccaggttcctccatcccagtgaatgacactatccagttaagcaagccaaaagtctggattttttttcctcactcttcctcactgtccgtcaactaccattattaaatctgtcacctggtcctactgatttaaccttctcaatatctctacagtttttctttatgcccattagtatcctagtgcaagctaccatcgtctctcattggaattaacacagtaacccccctacccaccagactgttctgcctacagatagtgtgatatttaataaatataaatctagccttggctagatttctccttcaaaaggttcacattaattttagccttaaaatggtgtgcaaagctttgcatagtctgtcctttgctatgttggcagtattttttactatccctctcatctgctcattctctgtactccaactacactaactttgtttttttttttttttagatttctctaactacagtgctgtaatctctttttcctttgcacgtactattccgtttgtcagggaatctgctcactgtctccacccactccacacactcacgttttcctgcccgtcttaccggtcttgatcggttgtcacttgctcaggaaggtttccctggtcaccccctccacaaattgaattaagtcctcttgctgcatgctgtcctagtgctctttattttcctctcctcatccttaattcagtttgtaattacatgttatttgtgtgaggatttgattattatctgtgtcacccactagatattgggcattctttacttactcaccactgaattcatagaaccacagtaattgtacacaacaaatattcaagagaaatttattgaattgatgaatgaaaagttgtaccttaacatgttcctgacatgtatccaaaaaagagctcccctttggggtctattaggactttggacctaggtaaacgtaaccctagtttcgctcaggtttaaacagtagaaagtaattgggtctcttttgcatgtggctttcctaagggctaaccctgtcttcggaatgagtcaatacagcagagctgttgaaagcagactctagcttcggacaacgttggtccgaatcatggttccgtcatttcttagctgtgtgatttagaataaattaatgttttaaagctttgatttcctcttccttaatctggagatgctaataaagccaacttcgtagaggtattgcgatgagtaaataagcataatttgctgtaaacaccttgcagattgcctgttgtatgctaactaatcaataaattgaagctcttaacatcattatattagatatttccagcattgagtatactatcaggcatgtggtagaagctcaatataaagttttgttaaattgaatagattccatatatggtatttctacagcattatgctccttatttaagtgtctctaagtattttttaagtatcacctcacaaaagacagatgtttaattcattacacatgtgaattgttttagatagaaaataaaataaaaaattcaaacattgaaatcaatagtgtaccttaccttaggattacaccataaaatttctaccaatcgagaataaagtgtacagtctatttcctttctaatacttttaacgcaacaaatgtttattgaacacttactacttctaatctatgacagacataaagatgaataaagcatgccacaatgtttaaaggagctcactatatcataagaaagcggattcacacagacaactctataagataaagtggtaaatttaggctggcctgtgaaacaaaggattataggtatagttaagaggtggaatttattttacttcgaggatttcagttacctttatattctttgtctaacctttcatgtttctctttcttcagaaacagagcacctttttcctgacacattcatttccccctatggagtagagcagttgttttcaaagtgtgggtcccagatcagcatcacggggatggttagaaatgcccattcttgagcctcacaacagacctactgaaacagaaattcttggagagtggagcccgcagatctgtgatcaagccctgtaggcaattctaacgcacactcaagttaaagaaccacgggaagaaaggtccatcctgtaacaagacagatttttttcattagcatcaa

SEQ ID NO: 472 - DNA, 6916 bp, Homo sapiens
  source 1..6916: mol_type = genomic DNA
atcagttactgtgttgactcactcagtgttgggatcactcactttccccctacaggactcagatctgggaggcaattaccttcggagaaaaacgaataggaaaaactgaagtgttactttttttaaagctgctgaagtttgttggtttctcattgtttttaagcctactggagcaataaagtttgaagaacttttaccaggttttttttatcgctgccttgatatacacttttcaaaatgctttggtgggaagaagtagaggactgttatgaaagagaagatgttcaaaagaaaacattcacaaaatgggtaaatgcacaattttctaagtttgggaagcagcatattgagaacctcttcagtgacctacaggatgggaggcgcctcctagacctcctcgaaggcctgacagggcaaaaactgccaaaagaaaaaggatccacaagagttcatgccctgaacaatgtcaacaaggcactgcgggttttgcagaacaataatgttgatttagtgaatattggaagtactgacatcgtagatggaaatcataaactgactcttggtttgatttggaatataatcctccactggcaggtcaaaaatgtaatgaaaaatatcatggctggattgcaacaaaccaacagtgaaaagattctcctgagctgggtccgacaatcaactcgtaattatccacaggttaatgtaatcaacttcaccaccagctggtctgatggcctggctttgaatgctctcatccatagtcataggccagacctatttgactggaatagtgtggtttgccagcagtcagccacacaacgactggaacatgcattcaacatcgccagatatcaattaggcatagagaaactactcgatcctgaagatgttgataccacctatccagataagaagtccatcttaatgtacatcacatcactcttccaagttttgcctcaacaagtgagcattgaagccatccaggaagtggaaatgttgccaaggccacctaaagtgactaaagaagaacattttcagttacatcatcaaatgcactattctcaacagatcacggtcagtctagcacagggatatgagagaacttcttcccctaagcctcgattcaagagctatgcctacacacaggctgcttatgtcaccacctctgaccctacacggagcccatttccttcacagcatttggaagctcctgaagacaagtcatttggcagttcattgatggagagtgaagtaaacctggaccgttatcaaacagctttagaagaagtattatcgtggcttctttctgctgaggacacattgcaagcacaaggagagatttctaatgatgtggaagtggtgaaagaccagtttcatactcatgaggggtacatgatggatttgacagcccatcagggccgggttggtaatattctacaattgggaagtaagctgattggaacaggaaaattatcagaagatgaagaaactgaagtacaagagcagatgaatctcctaaattcaagatgggaatgcctcagggtagctagcatggaaaaacaaagcaatttacatagagttttaatggatctccagaatcagaaactgaaagagttgaatgactggctaacaaaaacagaagaaagaacaaggaaaatggaggaagagcctcttggacctgatcttgaagacctaaaacgccaagtacaacaacataaggtgcttcaagaagatctagaacaagaacaagtcagggtcaattctctcactcacatggtggtggtagttgatgaatctagtggagatcacgcaactgctgctttggaagaacaacttaaggtattgggagatcgatgggcaaacatctgtagatggacagaagaccgctgggttcttttacaagacatccttctcaaatggcaacgtcttactgaagaacagtgcctttttagtgcatggctttcagaaaaagaagatgcagtgaacaagattcacacaactggctttaaagatcaaaatgaaatgttatcaagtcttcaaaaactggccgttttaaaagcggatctagaaaagaaaaagcaatccatgggcaaactgtattcactcaaacaagatcttctttcaacactgaagaataagtcagtgacccagaagacggaagcatggctggataactttgcccggtgttgggataatttagtccaaaaacttgaaaagagtacagcacagatttcacaggctgtcaccaccactcagccatcactaacacagacaactgtaatggaaacagtaactacggtgaccacaagggaacagatcctggtaaagcatgctcaagaggaacttccaccaccacctccccaaaagaagaggcagattactgtggattctgaaattaggaaaaggttggatgttgatataactgaacttcacagctggattactcgctcagaagctgtgttgcagagtcctgaatttgcaatctttcggaaggaaggcaacttctcagacttaaaagaaaaagtcaatgccatagagcgagaaaaagctgagaagttcagaaaactgcaagatgccagcagatcagctcaggccctggtggaacagatggtgaatgagggtgttaatgcagatagcatcaaacaagcctcagaacaactgaacagccggtggatcgaattctgccagttgctaagtgagagacttaactggctggagtatcagaacaacatcatcgctttctataatcagctacaacaattggagcagatgacaactactgctgaaaactggttgaaaatccaacccaccaccccatcagagccaacagcaattaaaagtcagttaaaaatttgtaaggatgaagtcaaccggctatcagatcttcaacctcaaattgaacgattaaaaattcaaagcatagccctgaaagagaaaggacaaggacccatgttcctggatgcagactttgtggcctttacaaatcattttaagcaagtcttttctgatgtgcaggccagagagaaagagctacagacaatttttgacactttgccaccaatgcgctatcaggagaccatgagtgccatcaggacatgggtccagcagtcagaaaccaaactctccatacctcaacttagtgtcaccgactatgaaatcatggagcagagactcggggaattgcaggctttacaaagttctctgcaagagcaacaaagtggcctatactatctcagcaccactgtgaaagagatgtcgaagaaagcgccctctgaaattagccggaaatatcaatcagaatttgaagaaattgagggacgctggaagaagctctcctcccagctggttgagcattgtcaaaagctagaggagcaaatgaataaactccgaaaaattcagaatcacatacaaaccctgaagaaatggatggctgaagttgatgtttttctgaaggaggaatggcctgcccttggggattcagaaattctaaaaaagcagctgaaacagtgcagacttttagtcagtgatattcagacaattcagcccagtctaaacagtgtcaatgaaggtgggcagaagataaagaatgaagcagagccagagtttgcttcgagacttgagacagaactcaaagaacttaacactcagtgggatcacatgtgccaacaggtctatgccagaaaggaggccttgaagggaggtttggagaaaactgtaagcctccagaaagatctatcagagatgcacgaatggatgacacaagctgaagaagagtatcttgagagagattttgaatataaaactccagatgaattacagaaagcagttgaagagatgaagagagctaaagaagaggcccaacaaaaagaagcgaaagtgaaactccttactgagtctgtaaatagtgtcatagctcaagctccacctgtagcacaagaggccttaaaaaaggaacttgaaactctaaccaccaactaccagtggctctgcactaggctgaatgggaaatgcaagactttggaagaagtttgggcatgttggcatgagttattgtcatacttggagaaagcaaacaagtggctaaatgaagtagaatttaaacttaaaaccactgaaaacattcctggcggagctgaggaaatctctgaggtgctagattcacttgaaaatttgatgcgacattcagaggataacccaaatcagattcgcatattggcacagaccctaacagatggcggagtcatggatgagctaatcaatgaggaacttgagacatttaattctcgttggagggaactacatgaagaggctgtaaggaggcaaaagttgcttgaacagagcatccagtctgcccaggagactgaaaaatccttacacttaatccaggagtccctcacattcattgacaagcagttggcagcttatattgcagacaaggtggacgcagctcaaatgcctcaggaagcccagaaaatccaatctgatttgacaagtcatgagatcagtttagaagaaatgaagaaacataatcaggggaaggaggctgcccaaagagtcctgtctcagattgatgttgcacagaaaaaattacaagatgtctccatgaagtttcgattattccagaaaccagccaattttgagcagcgtctacaagaaagtaagatgattttagatgaagtgaagatgcacttgcctgcattggaaacaaagagtgtggaacaggaagtagtacagtcacagctaaatcattgtgtgaacttgtataaaagtctgagtgaagtgaagtctgaagtggaaatggtgataaagactggacgtcagattgtacagaaaaagcagacggaaaatcccaaagaacttgatgaaagagtaacagctttgaaattgcattataatgagctgggagcaaaggtaacagaaagaaagcaacagttggagaaatgcttgaaattgtcccgtaagatgcgaaaggaaatgaatgtcttgacagaatggctggcagctacagatatggaattgacaaagagatcagcagttgaaggaatgcctagtaatttggattctgaagttgcctggggaaaggctactcaaaaagagattgagaaacagaaggtgcacctgaagagtatcacagaggtaggagaggccttgaaaacagttttgggcaagaaggagacgttggtggaagataaactcagtcttctgaatagtaactggatagctgtcacctcccgagcagaagagtggttaaatcttttgttggaataccagaaacacatggaaacttttgaccagaatgtggaccacatcacaaagtggatcattcaggctgacacacttttggatgaatcagagaaaaagaaaccccagcaaaaagaagacgtgcttaagcgtttaaaggcagaactgaatgacatacgcccaaaggtggactctacacgtgaccaagcagcaaacttgatggcaaaccgcggtgaccactgcaggaaattagtagagccccaaatctcagagctcaaccatcgatttgcagccatttcacacagaattaagactggaaaggcctccattcctttgaaggaattggagcagtttaactcagatatacaaaaattgcttgaaccactggaggctgaaattcagcagggggtgaatctgaaagaggaagacttcaataaagatatgaatgaagacaatgagggtactgtaaaagaattgttgcaaagaggagacaacttacaacaaagaatcacagatgagagaaagcgagaggaaataaagataaaacagcagctgttacagacaaaacataatgctctcaaggatttgaggtctcaaagaagaaaaaaggctctagaaatttctcatcagtggtatcagtacaagaggcaggctgatgatctcctgaaatgcttggatgacattgaaaaaaaattagccagcctacctgagcccagagatgaaaggaaaataaaggaaattgatcgggaattgcagaagaagaaagaggagctgaatgcagtgcgtaggcaagctgagggcttgtctgaggatggggccgcaatggcagtggagccaactcagatccagctcagcaagcgctggcgggaaattgagagcaaatttgctcagtttcgaagactcaactttgcacaaattcacactgtccgtgaagaaacgatgatggtgatgactgaagacatgcctttggaaatttcttatgtgccttctacttatttgactgaaatcactcatgtctcacaagccctattagaagtggaacaacttctcaatgctcctgacctctgtgctaaggactttgaagatctctttaagcaagaggagtctctgaagaatataaaagatagtctacaacaaagctcaggtcggattgacattattcatagcaagaagacagcagcattgcaaagtgcaacgcctgtggaaagggtgaagctacaggaagctctctcccagcttgatttccaatgggaaaaagttaacaaaatgtacaaggaccgacaagggcgatttgacagatctgttgagaaatggcggcgttttcattatgatataaagatatttaatcagtggctaacagaagctgaacagtttctcagaaagacacaaattcctgagaattgggaacatgctaaatacaaatggtatcttaagatctccgagaggcagaaaaaggggaactgtgcaacccttttgtccttctggatctcaaaatgaagggatacattctgctacatgaaatgtggaattaagaccatgatgcaacatgataaacaacacaaatttgggggtgtctctgtgctatacattattgaatttttccatgctatacactttttggatgtgtctgtgctatttattcagtttttttaaataaaagtttttgtagactaaa

SEQ ID NO: 473 - DNA, 6337 bp, Homo sapiens
  source 1..6337: mol_type = genomic DNA
atcagttactgtgttgactcactcagtgttgggatcactcactttccccctacaggactcagatctgggaggcaattaccttcggagaaaaacgaataggaaaaactgaagtgttactttttttaaagctgctgaagtttgttggtttctcattgtttttaagcctactggagcaataaagtttgaagaacttttaccaggttttttttatcgctgccttgatatacacttttcaaaatgctttggtgggaagaagtagaggactgttatgaaagagaagatgttcaaaagaaaacattcacaaaatgggtaaatgcacaattttctaagtttgggaagcagcatattgagaacctcttcagtgacctacaggatgggaggcgcctcctagacctcctcgaaggcctgacagggcaaaaactgccaaaagaaaaaggatccacaagagttcatgccctgaacaatgtcaacaaggcactgcgggttttgcagaacaataatgttgatttagtgaatattggaagtactgacatcgtagatggaaatcataaactgactcttggtttgatttggaatataatcctccactggcaggtcaaaaatgtaatgaaaaatatcatggctggattgcaacaaaccaacagtgaaaagattctcctgagctgggtccgacaatcaactcgtaattatccacaggttaatgtaatcaacttcaccaccagctggtctgatggcctggctttgaatgctctcatccatagtcataggccagacctatttgactggaatagtgtggtttgccagcagtcagccacacaacgactggaacatgcattcaacatcgccagatatcaattaggcatagagaaactactcgatcctgaagatgttgataccacctatccagataagaagtccatcttaatgtacatcacatcactcttccaagttttgcctcaacaagtgagcattgaagccatccaggaagtggaaatgttgccaaggccacctaaagtgactaaagaagaacattttcagttacatcatcaaatgcactattctcaacagatcacggtcagtctagcacagggatatgagagaacttcttcccctaagcctcgattcaagagctatgcctacacacaggctgcttatgtcaccacctctgaccctacacggagcccatttccttcacagcatttggaagctcctgaagacaagtcatttggcagttcattgatggagagtgaagtaaacctggaccgttatcaaacagctttagaagaagtattatcgtggcttctttctgctgaggacacattgcaagcacaaggagagatttctaatgatgtggaagtggtgaaagaccagtttcatactcatgaggggtacatgatggatttgacagcccatcagggccgggttggtaatattctacaattgggaagtaagctgattggaacaggaaaattatcagaagatgaagaaactgaagtacaagagcagatgaatctcctaaattcaagatgggaatgcctcagggtagctagcatggaaaaacaaagcaatttacatagagttttaatggatctccagaatcagaaactgaaagagttgaatgactggctaacaaaaacagaagaaagaacaaggaaaatggaggaagagcctcttggacctgatcttgaagacctaaaacgccaagtacaacaacataaggtgcttcaagaagatctagaacaagaacaagtcagggtcaattctctcactcacatggtggtggtagttgatgaatctagtggagatcacgcaactgctgctttggaagaacaacttaaggtattgggagatcgatgggcaaacatctgtagatggacagaagaccgctgggttcttttacaagacatccttctcaaatggcaacgtcttactgaagaacagtgcctttttagtgcatggctttcagaaaaagaagatgcagtgaacaagattcacacaactggctttaaagatcaaaatgaaatgttatcaagtcttcaaaaactggccgttttaaaagcggatctagaaaagaaaaagcaatccatgggcaaactgtattcactcaaacaagatcttctttcaacactgaagaataagtcagtgacccagaagacggaagcatggctggataactttgcccggtgttgggataatttagtccaaaaacttgaaaagagtacagcacagatttcacaggctgtcaccaccactcagccatcactaacacagacaactgtaatggaaacagtaactacggtgaccacaagggaacagatcctggtaaagcatgctcaagaggaacttccaccaccacctccccaaaagaagaggcagattactgtggattctgaaattaggaaaaggttggatgttgatataactgaacttcacagctggattactcgctcagaagctgtgttgcagagtcctgaatttgcaatctttcggaaggaaggcaacttctcagacttaaaagaaaaagtcaatgccatagagcgagaaaaagctgagaagttcagaaaactgcaagatgccagcagatcagctcaggccctggtggaacagatggtgaatgagggtgttaatgcagatagcatcaaacaagcctcagaacaactgaacagccggtggatcgaattctgccagttgctaagtgagagacttaactggctggagtatcagaacaacatcatcgctttctataatcagctacaacaattggagcagatgacaactactgctgaaaactggttgaaaatccaacccaccaccccatcagagccaacagcaattaaaagtcagttaaaaatttgtaaggatgaagtcaaccggctatcagatcttcaacctcaaattgaacgattaaaaattcaaagcatagccctgaaagagaaaggacaaggacccatgttcctggatgcagactttgtggcctttacaaatcattttaagcaagtcttttctgatgtgcaggccagagagaaagagctacagacaatttttgacactttgccaccaatgcgctatcaggagaccatgagtgccatcaggacatgggtccagcagtcagaaaccaaactctccatacctcaacttagtgtcaccgactatgaaatcatggagcagagactcggggaattgcaggctttacaaagttctctgcaagagcaacaaagtggcctatactatctcagcaccactgtgaaagagatgtcgaagaaagcgccctctgaaattagccggaaatatcaatcagaatttgaagaaattgagggacgctggaagaagctctcctcccagctggttgagcattgtcaaaagctagaggagcaaatgaataaactccgaaaaattcagaatcacatacaaaccctgaagaaatggatggctgaagttgatgtttttctgaaggaggaatggcctgcccttggggattcagaaattctaaaaaagcagctgaaacagtgcagacttttagtcagtgatattcagacaattcagcccagtctaaacagtgtcaatgaaggtgggcagaagataaagaatgaagcagagccagagtttgcttcgagacttgagacagaactcaaagaacttaacactcagtgggatcacatgtgccaacaggtctatgccagaaaggaggccttgaagggaggtttggagaaaactgtaagcctccagaaagatctatcagagatgcacgaatggatgacacaagctgaagaagagtatcttgagagagattttgaatataaaactccagatgaattacagaaagcagttgaagagatgaagagagctaaagaagaggcccaacaaaaagaagcgaaagtgaaactccttactgagtctgtaaatagtgtcatagctcaagctccacctgtagcacaagaggccttaaaaaaggaacttgaaactctaaccaccaactaccagtggctctgcactaggctgaatgggaaatgcaagactttggaagaagtttgggcatgttggcatgagttattgtcatacttggagaaagcaaacaagtggctaaatgaagtagaatttaaacttaaaaccactgaaaacattcctggcggagctgaggaaatctctgaggtgctagattcacttgaaaatttgatgcgacattcagaggataacccaaatcagattcgcatattggcacagaccctaacagatggcggagtcatggatgagctaatcaatgaggaacttgagacatttaattctcgttggagggaactacatgaagaggctgtaaggaggcaaaagttgcttgaacagagcatccagtctgcccaggagactgaaaaatccttacacttaatccaggagtccctcacattcattgacaagcagttggcagcttatattgcagacaaggtggacgcagctcaaatgcctcaggaagcccagaaaatccaatctgatttgacaagtcatgagatcagtttagaagaaatgaagaaacataatcaggggaaggaggctgcccaaagagtcctgtctcagattgatgttgcacagaaaaaattacaagatgtctccatgaagtttcgattattccagaaaccagccaattttgagcagcgtctacaagaaagtaagatgattttagatgaagtgaagatgcacttgcctgcattggaaacaaagagtgtggaacaggaagtagtacagtcacagctaaatcattgtgtgaacttgtataaaagtctgagtgaagtgaagtctgaagtggaaatggtgataaagactggacgtcagattgtacagaaaaagcagacggaaaatcccaaagaacttgatgaaagagtaacagctttgaaattgcattataatgagctgggagcaaaggtaacagaaagaaagcaacagttggagaaatgcttgaaattgtcccgtaagatgcgaaaggaaatgaatgtcttgacagaatggctggcagctacagatatggaattgacaaagagatcagcagttgaaggaatgcctagtaatttggattctgaagttgcctggggaaaggctactcaaaaagagattgagaaacagaaggtgcacctgaagagtatcacagaggtaggagaggccttgaaaacagttttgggcaagaaggagacgttggtggaagataaactcagtcttctgaatagtaactggatagctgtcacctcccgagcagaagagtggttaaatcttttgttggaataccagaaacacatggaaacttttgaccagaatgtggaccacatcacaaagtggatcattcaggctgacacacttttggatgaatcagagaaaaagaaaccccagcaaaaagaagacgtgcttaagcgtttaaaggcagaactgaatgacatacgcccaaaggtggactctacacgtgaccaagcagcaaacttgatggcaaaccgcggtgaccactgcaggaaattagtagagccccaaatctcagagctcaaccatcgatttgcagccatttcacacagaattaagactggaaagaatgaagacaatgagggtactgtaaaagaattgttgcaaagaggagacaacttacaacaaagaatcacagatgagagaaagcgagaggaaataaagataaaacagcagctgttacagacaaaacataatgctctcaaggatttgaggtctcaaagaagaaaaaaggctctagaaatttctcatcagtggtatcagtacaagaggcaggctgatgatctcctgaaatgcttggatgacattgaaaaaaaattagccagcctacctgagcccagagatgaaaggaaaataaagatgaactaatgacttatcggtatatggacgacttcttactcatgttagcccattcatttcatcagagcatcttcacacatcagtgttcactctctatagatttatttgcatattgtctaaatatgtttttttctgttattattttacactttttattttgcttcattctctgttgagttcctcaaacctttaaaaaggaaataaataacttattcacttaccctctaaattatattctatgtggacggtccctaataaataatgagttatcactccaaattgtttcaaatcccaagacaccagaggaatttagaagaaagaaaatgttagaccaatttcaatatttacttaattagaatatctaaaaccaagcattcaaaggataactgaaataatatttgggttattgagcgaggatgacagtcatgcctttcatatttgtaaacttcaaaggatgacaataaagggacaacagcctttgaaa

SEQ ID NO: 474 - DNA, 6460 bp, Homo sapiens
  source 1..6460: mol_type = genomic DNA
atcagttactgtgttgactcactcagtgttgggatcactcactttccccctacaggactcagatctgggaggcaattaccttcggagaaaaacgaataggaaaaactgaagtgttactttttttaaagctgctgaagtttgttggtttctcattgtttttaagcctactggagcaataaagtttgaagaacttttaccaggttttttttatcgctgccttgatatacacttttcaaaatgctttggtgggaagaagtagaggactgttatgaaagagaagatgttcaaaagaaaacattcacaaaatgggtaaatgcacaattttctaagtttgggaagcagcatattgagaacctcttcagtgacctacaggatgggaggcgcctcctagacctcctcgaaggcctgacagggcaaaaactgccaaaagaaaaaggatccacaagagttcatgccctgaacaatgtcaacaaggcactgcgggttttgcagaacaataatgttgatttagtgaatattggaagtactgacatcgtagatggaaatcataaactgactcttggtttgatttggaatataatcctccactggcaggtcaaaaatgtaatgaaaaatatcatggctggattgcaacaaaccaacagtgaaaagattctcctgagctgggtccgacaatcaactcgtaattatccacaggttaatgtaatcaacttcaccaccagctggtctgatggcctggctttgaatgctctcatccatagtcataggccagacctatttgactggaatagtgtggtttgccagcagtcagccacacaacgactggaacatgcattcaacatcgccagatatcaattaggcatagagaaactactcgatcctgaagatgttgataccacctatccagataagaagtccatcttaatgtacatcacatcactcttccaagttttgcctcaacaagtgagcattgaagccatccaggaagtggaaatgttgccaaggccacctaaagtgactaaagaagaacattttcagttacatcatcaaatgcactattctcaacagatcacggtcagtctagcacagggatatgagagaacttcttcccctaagcctcgattcaagagctatgcctacacacaggctgcttatgtcaccacctctgaccctacacggagcccatttccttcacagcatttggaagctcctgaagacaagtcatttggcagttcattgatggagagtgaagtaaacctggaccgttatcaaacagctttagaagaagtattatcgtggcttctttctgctgaggacacattgcaagcacaaggagagatttctaatgatgtggaagtggtgaaagaccagtttcatactcatgaggggtacatgatggatttgacagcccatcagggccgggttggtaatattctacaattgggaagtaagctgattggaacaggaaaattatcagaagatgaagaaactgaagtacaagagcagatgaatctcctaaattcaagatgggaatgcctcagggtagctagcatggaaaaacaaagcaatttacatagagttttaatggatctccagaatcagaaactgaaagagttgaatgactggctaacaaaaacagaagaaagaacaaggaaaatggaggaagagcctcttggacctgatcttgaagacctaaaacgccaagtacaacaacataaggtgcttcaagaagatctagaacaagaacaagtcagggtcaattctctcactcacatggtggtggtagttgatgaatctagtggagatcacgcaactgctgctttggaagaacaacttaaggtattgggagatcgatgggcaaacatctgtagatggacagaagaccgctgggttcttttacaagacatccttctcaaatggcaacgtcttactgaagaacagtgcctttttagtgcatggctttcagaaaaagaagatgcagtgaacaagattcacacaactggctttaaagatcaaaatgaaatgttatcaagtcttcaaaaactggccgttttaaaagcggatctagaaaagaaaaagcaatccatgggcaaactgtattcactcaaacaagatcttctttcaacactgaagaataagtcagtgacccagaagacggaagcatggctggataactttgcccggtgttgggataatttagtccaaaaacttgaaaagagtacagcacagatttcacaggctgtcaccaccactcagccatcactaacacagacaactgtaatggaaacagtaactacggtgaccacaagggaacagatcctggtaaagcatgctcaagaggaacttccaccaccacctccccaaaagaagaggcagattactgtggattctgaaattaggaaaaggttggatgttgatataactgaacttcacagctggattactcgctcagaagctgtgttgcagagtcctgaatttgcaatctttcggaaggaaggcaacttctcagacttaaaagaaaaagtcaatgccatagagcgagaaaaagctgagaagttcagaaaactgcaagatgccagcagatcagctcaggccctggtggaacagatggtgaatgagggtgttaatgcagatagcatcaaacaagcctcagaacaactgaacagccggtggatcgaattctgccagttgctaagtgagagacttaactggctggagtatcagaacaacatcatcgctttctataatcagctacaacaattggagcagatgacaactactgctgaaaactggttgaaaatccaacccaccaccccatcagagccaacagcaattaaaagtcagttaaaaatttgtaaggatgaagtcaaccggctatcagatcttcaacctcaaattgaacgattaaaaattcaaagcatagccctgaaagagaaaggacaaggacccatgttcctggatgcagactttgtggcctttacaaatcattttaagcaagtcttttctgatgtgcaggccagagagaaagagctacagacaatttttgacactttgccaccaatgcgctatcaggagaccatgagtgccatcaggacatgggtccagcagtcagaaaccaaactctccatacctcaacttagtgtcaccgactatgaaatcatggagcagagactcggggaattgcaggctttacaaagttctctgcaagagcaacaaagtggcctatactatctcagcaccactgtgaaagagatgtcgaagaaagcgccctctgaaattagccggaaatatcaatcagaatttgaagaaattgagggacgctggaagaagctctcctcccagctggttgagcattgtcaaaagctagaggagcaaatgaataaactccgaaaaattcagaatcacatacaaaccctgaagaaatggatggctgaagttgatgtttttctgaaggaggaatggcctgcccttggggattcagaaattctaaaaaagcagctgaaacagtgcagacttttagtcagtgatattcagacaattcagcccagtctaaacagtgtcaatgaaggtgggcagaagataaagaatgaagcagagccagagtttgcttcgagacttgagacagaactcaaagaacttaacactcagtgggatcacatgtgccaacaggtctatgccagaaaggaggccttgaagggaggtttggagaaaactgtaagcctccagaaagatctatcagagatgcacgaatggatgacacaagctgaagaagagtatcttgagagagattttgaatataaaactccagatgaattacagaaagcagttgaagagatgaagagagctaaagaagaggcccaacaaaaagaagcgaaagtgaaactccttactgagtctgtaaatagtgtcatagctcaagctccacctgtagcacaagaggccttaaaaaaggaacttgaaactctaaccaccaactaccagtggctctgcactaggctgaatgggaaatgcaagactttggaagaagtttgggcatgttggcatgagttattgtcatacttggagaaagcaaacaagtggctaaatgaagtagaatttaaacttaaaaccactgaaaacattcctggcggagctgaggaaatctctgaggtgctagattcacttgaaaatttgatgcgacattcagaggataacccaaatcagattcgcatattggcacagaccctaacagatggcggagtcatggatgagctaatcaatgaggaacttgagacatttaattctcgttggagggaactacatgaagaggctgtaaggaggcaaaagttgcttgaacagagcatccagtctgcccaggagactgaaaaatccttacacttaatccaggagtccctcacattcattgacaagcagttggcagcttatattgcagacaaggtggacgcagctcaaatgcctcaggaagcccagaaaatccaatctgatttgacaagtcatgagatcagtttagaagaaatgaagaaacataatcaggggaaggaggctgcccaaagagtcctgtctcagattgatgttgcacagaaaaaattacaagatgtctccatgaagtttcgattattccagaaaccagccaattttgagcagcgtctacaagaaagtaagatgattttagatgaagtgaagatgcacttgcctgcattggaaacaaagagtgtggaacaggaagtagtacagtcacagctaaatcattgtgtgaacttgtataaaagtctgagtgaagtgaagtctgaagtggaaatggtgataaagactggacgtcagattgtacagaaaaagcagacggaaaatcccaaagaacttgatgaaagagtaacagctttgaaattgcattataatgagctgggagcaaaggtaacagaaagaaagcaacagttggagaaatgcttgaaattgtcccgtaagatgcgaaaggaaatgaatgtcttgacagaatggctggcagctacagatatggaattgacaaagagatcagcagttgaaggaatgcctagtaatttggattctgaagttgcctggggaaaggctactcaaaaagagattgagaaacagaaggtgcacctgaagagtatcacagaggtaggagaggccttgaaaacagttttgggcaagaaggagacgttggtggaagataaactcagtcttctgaatagtaactggatagctgtcacctcccgagcagaagagtggttaaatcttttgttggaataccagaaacacatggaaacttttgaccagaatgtggaccacatcacaaagtggatcattcaggctgacacacttttggatgaatcagagaaaaagaaaccccagcaaaaagaagacgtgcttaagcgtttaaaggcagaactgaatgacatacgcccaaaggtggactctacacgtgaccaagcagcaaacttgatggcaaaccgcggtgaccactgcaggaaattagtagagccccaaatctcagagctcaaccatcgatttgcagccatttcacacagaattaagactggaaaggcctccattcctttgaaggaattggagcagtttaactcagatatacaaaaattgcttgaaccactggaggctgaaattcagcagggggtgaatctgaaagaggaagacttcaataaagatatgaatgaagacaatgagggtactgtaaaagaattgttgcaaagaggagacaacttacaacaaagaatcacagatgagagaaagcgagaggaaataaagataaaacagcagctgttacagacaaaacataatgctctcaaggatttgaggtctcaaagaagaaaaaaggctctagaaatttctcatcagtggtatcagtacaagaggcaggctgatgatctcctgaaatgcttggatgacattgaaaaaaaattagccagcctacctgagcccagagatgaaaggaaaataaagatgaactaatgacttatcggtatatggacgacttcttactcatgttagcccattcatttcatcagagcatcttcacacatcagtgttcactctctatagatttatttgcatattgtctaaatatgtttttttctgttattattttacactttttattttgcttcattctctgttgagttcctcaaacctttaaaaaggaaataaataacttattcacttaccctctaaattatattctatgtggacggtccctaataaataatgagttatcactccaaattgtttcaaatcccaagacaccagaggaatttagaagaaagaaaatgttagaccaatttcaatatttacttaattagaatatctaaaaccaagcattcaaaggataactgaaataatatttgggttattgagcgaggatgacagtcatgcctttcatatttgtaaacttcaaaggatgacaataaagggacaacagcctttgaaa

SEQ ID NO: 475 - DNA, 1464 bp, Homo sapiens
  source 1..1464: mol_type = genomic DNA
ccacaaatgtgggagggcgataaccactcgtagaaagcgtgagaagttactacaagcggtcctcccggccaccgtactgttccgctcccagaagccccgggcggcggaagtcgtcactcttaagaagggacggggccccacgctgcgcacccgcgggtttgctatggcgatgagcagcggcggcagtggtggcggcgtcccggagcaggaggattccgtgctgttccggcgcggcacaggccagagcgatgattctgacatttgggatgatacagcactgataaaagcatatgataaagctgtggcttcatttaagcatgctctaaagaatggtgacatttgtgaaacttcgggtaaaccaaaaaccacacctaaaagaaaacctgctaagaagaataaaagccaaaagaagaatactgcagcttccttacaacagtggaaagttggggacaaatgttctgccatttggtcagaagacggttgcatttacccagctaccattgcttcaattgattttaagagagaaacctgtgttgtggtttacactggatatggaaatagagaggagcaaaatctgtccgatctactttccccaatctgtgaagtagctaataatatagaacaaaatgctcaagagaatgaaaatgaaagccaagtttcaacagatgaaagtgagaactccaggtctcctggaaataaatcagataacatcaagcccaaatctgctccatggaactcttttctccctccaccaccccccatgccagggccaagactgggaccaggaaagccaggtctaaaattcaatggcccaccaccgccaccgccaccaccaccaccccacttactatcatgctggctgcctccatttccttctggaccaccaataattcccccaccacctcccatatgtccagattctcttgatgatgctgatgctttgggaagtatgttaatttcatggtacatgagtggctatcatactggctattatatgtttcctgaggcctccctaaaagccgagcagatgccagcaccatgcttcctgtaaagcctgcagaaccgtgagtcaactaaacctcttttctttatgaaagaaaaggaaggaagggagagagggaaggagaaaaagagagagggagagatggatggaggaagggagggagggcttacaaccatgaggacagtttttaggtcaatgagggatgacttgggagtcctatgaagactgatgtaaactagaataaagggcatgatgagcttatgattcaaaagtattttgtcatagaaatagtttgttttctgtaaaagaacacagtaaatattttagctttgtaggccactgagtctctgttgctttaaaaaatgtgaaaaccattcttagcttgagggctggacagtccagggccatactttactgaccgctgcttgaactaaacgctgttagaagcagctctggaaaaa

SEQ ID NO: 476 - DNA, 1478 bp, Homo sapiens
  source 1..1478: mol_type = genomic DNA
ccacaaatgtgggagggcgataaccactcgtagaaagcgtgagaagttactacaagcggtcctcccggccaccgtactgttccgctcccagaagccccgggcggcggaagtcgtcactcttaagaagggacggggccccacgctgcgcacccgcgggtttgctatggcgatgagcagcggcggcagtggtggcggcgtcccggagcaggaggattccgtgctgttccggcgcggcacaggccagagcgatgattctgacatttgggatgatacagcactgataaaagcatatgataaagctgtggcttcatttaagcatgctctaaagaatggtgacatttgtgaaacttcgggtaaaccaaaaaccacacctaaaagaaaacctgctaagaagaataaaagccaaaagaagaatactgcagcttccttacaacagtggaaagttggggacaaatgttctgccatttggtcagaagacggttgcatttacccagctaccattgcttcaattgattttaagagagaaacctgtgttgtggtttacactggatatggaaatagagaggagcaaaatctgtccgatctactttccccaatctgtgaagtagctaataatatagaacaaaatgctcaagagaatgaaaatgaaagccaagtttcaacagatgaaagtgagaactccaggtctcctggaaataaatcagataacatcaagcccaaatctgctccatggaactcttttctccctccaccaccccccatgccagggccaagactgggaccaggaaagataattcccccaccacctcccatatgtccagattctcttgatgatgctgatgctttgggaagtatgttaatttcatggtacatgagtggctatcatactggctattatatggaaatgctggcatagagcagcactaaatgacaccactaaagaaacgatcagacagatctggaatgtgaagcgttatagaagataactggcctcatttcttcaaaatatcaagtgttgggaaagaaaaaaggaagtggaatgggtaactcttcttgattaaaagttatgtaataaccaaatgcaatgtgaaatattttactggactctattttgaaaaaccatctgtaaaagactggggtgggggtgggaggccagcacggtggtgaggcagttgagaaaatttgaatgtggattagattttgaatgatattggataattattggtaattttatgagctgtgagaagggtgttgtagtttataaaagactgtcttaatttgcatacttaagcatttaggaatgaagtgttagagtgtcttaaaatgtttcaaatggtttaacaaaatgtatgtgaggcgtatgtggcaaaatgttacagaatctaactggtggacatggctgttcattgtactgtttttttctatcttctatatgtttaaaagtatataataaaaatatttaatttttttttaaatta

SEQ ID NO: 477 - DNA, 1427 bp, Homo sapiens
  source 1..1427: mol_type = genomic DNA
ccacaaatgtgggagggcgataaccactcgtagaaagcgtgagaagttactacaagcggtcctcccggccaccgtactgttccgctcccagaagccccgggcggcggaagtcgtcactcttaagaagggacggggccccacgctgcgcacccgcgggtttgctatggcgatgagcagcggcggcagtggtggcggcgtcccggagcaggaggattccgtgctgttccggcgcggcacaggccagagcgatgattctgacatttgggatgatacagcactgataaaagcatatgataaagctgtggcttcatttaagcatgctctaaagaatggtgacatttgtgaaacttcgggtaaaccaaaaaccacacctaaaagaaaacctgctaagaagaataaaagccaaaagaagaatactgcagcttccttacaacagaatgaaaatgaaagccaagtttcaacagatgaaagtgagaactccaggtctcctggaaataaatcagataacatcaagcccaaatctgctccatggaactcttttctccctccaccaccccccatgccagggccaagactgggaccaggaaagccaggtctaaaattcaatggcccaccaccgccaccgccaccaccaccaccccacttactatcatgctggctgcctccatttccttctggaccaccaataattcccccaccacctcccatatgtccagattctcttgatgatgctgatgctttgggaagtatgttaatttcatggtacatgagtggctatcatactggctattatatgggtttcagacaaaatcaaaaagaaggaaggtgctcacattccttaaattaaggagaaatgctggcatagagcagcactaaatgacaccactaaagaaacgatcagacagatctggaatgtgaagcgttatagaagataactggcctcatttcttcaaaatatcaagtgttgggaaagaaaaaaggaagtggaatgggtaactcttcttgattaaaagttatgtaataaccaaatgcaatgtgaaatattttactggactctattttgaaaaaccatctgtaaaagactggggtgggggtgggaggccagcacggtggtgaggcagttgagaaaatttgaatgtggattagattttgaatgatattggataattattggtaattttatgagctgtgagaagggtgttgtagtttataaaagactgtcttaatttgcatacttaagcatttaggaatgaagtgttagagtgtcttaaaatgtttcaaatggtttaacaaaatgtatgtgaggcgtatgtggcaaaatgttacagaatctaactggtggacatggctgttcattgtactgtttttttctatcttctatatgtttaaaagtatataataaaaatatttaatttttttttaaatta

SEQ ID NO: 478 - DNA, 1373 bp, Homo sapiens
  source 1..1373: mol_type = genomic DNA
ccacaaatgtgggagggcgataaccactcgtagaaagcgtgagaagttactacaagcggtcctcccggccaccgtactgttccgctcccagaagccccgggcggcggaagtcgtcactcttaagaagggacggggccccacgctgcgcacccgcgggtttgctatggcgatgagcagcggcggcagtggtggcggcgtcccggagcaggaggattccgtgctgttccggcgcggcacaggccagagcgatgattctgacatttgggatgatacagcactgataaaagcatatgataaagctgtggcttcatttaagcatgctctaaagaatggtgacatttgtgaaacttcgggtaaaccaaaaaccacacctaaaagaaaacctgctaagaagaataaaagccaaaagaagaatactgcagcttccttacaacagaatgaaaatgaaagccaagtttcaacagatgaaagtgagaactccaggtctcctggaaataaatcagataacatcaagcccaaatctgctccatggaactcttttctccctccaccaccccccatgccagggccaagactgggaccaggaaagccaggtctaaaattcaatggcccaccaccgccaccgccaccaccaccaccccacttactatcatgctggctgcctccatttccttctggaccaccaataattcccccaccacctcccatatgtccagattctcttgatgatgctgatgctttgggaagtatgttaatttcatggtacatgagtggctatcatactggctattatatggaaatgctggcatagagcagcactaaatgacaccactaaagaaacgatcagacagatctggaatgtgaagcgttatagaagataactggcctcatttcttcaaaatatcaagtgttgggaaagaaaaaaggaagtggaatgggtaactcttcttgattaaaagttatgtaataaccaaatgcaatgtgaaatattttactggactctattttgaaaaaccatctgtaaaagactggggtgggggtgggaggccagcacggtggtgaggcagttgagaaaatttgaatgtggattagattttgaatgatattggataattattggtaattttatgagctgtgagaagggtgttgtagtttataaaagactgtcttaatttgcatacttaagcatttaggaatgaagtgttagagtgtcttaaaatgtttcaaatggtttaacaaaatgtatgtgaggcgtatgtggcaaaatgttacagaatctaactggtggacatggctgttcattgtactgtttttttctatcttctatatgtttaaaagtatataataaaaatatttaatttttttttaaatta

SEQ ID NO: 479 - DNA, 1571 bp, Homo sapiens
  source 1..1571: mol_type = genomic DNA
ccacaaatgtgggagggcgataaccactcgtagaaagcgtgagaagttactacaagcggtcctcccggccaccgtactgttccgctcccagaagccccgggcggcggaagtcgtcactcttaagaagggacggggccccacgctgcgcacccgcgggtttgctatggcgatgagcagcggcggcagtggtggcggcgtcccggagcaggaggattccgtgctgttccggcgcggcacaggccagagcgatgattctgacatttgggatgatacagcactgataaaagcatatgataaagctgtggcttcatttaagcatgctctaaagaatggtgacatttgtgaaacttcgggtaaaccaaaaaccacacctaaaagaaaacctgctaagaagaataaaagccaaaagaagaatactgcagcttccttacaacagtggaaagttggggacaaatgttctgccatttggtcagaagacggttgcatttacccagctaccattgcttcaattgattttaagagagaaacctgtgttgtggtttacactggatatggaaatagagaggagcaaaatctgtccgatctactttccccaatctgtgaagtagctaataatatagaacaaaatgctcaagagaatgaaaatgaaagccaagtttcaacagatgaaagtgagaactccaggtctcctggaaataaatcagataacatcaagcccaaatctgctccatggaactcttttctccctccaccaccccccatgccagggccaagactgggaccaggaaagccaggtctaaaattcaatggcccaccaccgccaccgccaccaccaccaccccacttactatcatgctggctgcctccatttccttctggaccaccaataattcccccaccacctcccatatgtccagattctcttgatgatgctgatgctttgggaagtatgttaatttcatggtacatgagtggctatcatactggctattatatggaaatgctggcatagagcagcactaaatgacaccactaaagaaacgatcagacagatctggaatgtgaagcgttatagaagataactggcctcatttcttcaaaatatcaagtgttgggaaagaaaaaaggaagtggaatgggtaactcttcttgattaaaagttatgtaataaccaaatgcaatgtgaaatattttactggactctattttgaaaaaccatctgtaaaagactggggtgggggtgggaggccagcacggtggtgaggcagttgagaaaatttgaatgtggattagattttgaatgatattggataattattggtaattttatgagctgtgagaagggtgttgtagtttataaaagactgtcttaatttgcatacttaagcatttaggaatgaagtgttagagtgtcttaaaatgtttcaaatggtttaacaaaatgtatgtgaggcgtatgtggcaaaatgttacagaatctaactggtggacatggctgttcattgtactgtttttttctatcttctatatgtttaaaagtatataataaaaatatttaatttttttttaaa

SEQ ID NO: 480 - DNA, 1545 bp, Homo sapiens
  source 1..1545: mol_type = genomic DNA
ccacaaatgtgggagggcgataaccactcgtagaaagcgtgagaagttactacaagcggtcctcccggccaccgtactgttccgctcccagaagccccgggcggcggaagtcgtcactcttaagaagggacggggccccacgctgcgcacccgcgggtttgctatggcgatgagcagcggcggcagtggtggcggcgtcccggagcaggaggattccgtgctgttccggcgcggcacaggccagagcgatgattctgacatttgggatgatacagcactgataaaagcatatgataaagctgtggcttcatttaagcatgctctaaagaatggtgacatttgtgaaacttcgggtaaaccaaaaaccacacctaaaagaaaacctgctaagaagaataaaagccaaaagaagaatactgcagcttccttacaacagtggaaagttggggacaaatgttctgccatttggtcagaagacggttgcatttacccagctaccattgcttcaattgattttaagagagaaacctgtgttgtggtttacactggatatggaaatagagaggagcaaaatctgtccgatctactttccccaatctgtgaagtagctaataatatagaacaaaatgctcaagagaatgaaaatgaaagccaagtttcaacagatgaaagtgagaactccaggtctcctggaaataaatcagataacatcaagcccaaatctgctccatggaactcttttctccctccaccaccccccatgccagggccaagactgggaccaggaaagataattcccccaccacctcccatatgtccagattctcttgatgatgctgatgctttgggaagtatgttaatttcatggtacatgagtggctatcatactggctattatatgggtttcagacaaaatcaaaaagaaggaaggtgctcacattccttaaattaaggagaaatgctggcatagagcagcactaaatgacaccactaaagaaacgatcagacagatctggaatgtgaagcgttatagaagataactggcctcatttcttcaaaatatcaagtgttgggaaagaaaaaaggaagtggaatgggtaactcttcttgattaaaagttatgtaataaccaaatgcaatgtgaaatattttactggactctattttgaaaaaccatctgtaaaagactggggtgggggtgggaggccagcacggtggtgaggcagttgagaaaatttgaatgtggattagattttgaatgatattggataattattggtaattttatgagctgtgagaagggtgttgtagtttataaaagactgtcttaatttgcatacttaagcatttaggaatgaagtgttagagtgtcttaaaatgtttcaaatggtttaacaaaatgtatgtgaggcgtatgtggcaaaatgttacagaatctaactggtggacatggctgttcattgtactgtttttttctatcttctatatgtttaaaagtatataataaaaatatttaatttttttttaaaaaaaaaaaaaaaaaaa

SEQ ID NO: 481 - DNA, 1109 bp, Homo sapiens
  source 1..1109: mol_type = genomic DNA
ccacaaatgtgggagggcgataaccactcgtagaaagcgtgagaagttactacaagcggtcctcccggccaccgtactgttccgctcccagaagccccgggcggcggaagtcgtcactcttaagaagggacggggccccacgctgcgcacccgcgggtttgctatggcgatgagcagcggcggcagtggtggcggcgtcccggagcaggaggattccgtgctgttccggcgcggcacaggccagagcgatgattctgacatttgggatgatacagcactgataaaagcatatgataaagctgtggcttcatttaagcatgctctaaagaatggtgacatttgtgaaacttcgggtaaaccaaaaaccacacctaaaagaaaacctgctaagaagaataaaagccaaaagaagaatactgcagcttccttacaacagtggaaagttggggacaaatgttctgccatttggtcagaagacggttgcatttacccagctaccattgcttcaattgattttaagagagaaacctgtgttgtggtttacactggatatggaaatagagaggagcaaaatctgtccgatctactttccccaatctgtgaagtagctaataatatagaacaaaatgctcaagagaatgaaaatgaaagccaagtttcaacagatgaaagtgagaactccaggtctcctggaaataaatcagataacatcaagcccaaatctgctccatggaactcttttctccctccaccaccccccatgccagggccaagactgggaccaggaaagataattcccccaccacctcccatatgtccagattctcttgatgatgctgatgctttgggaagtatgttaatttcatggtacatgagtggctatcatactggctattatatgggtttcagacaaaatcaaaaagaaggaaggtgctcacattccttaaattaaggagtaagtctgccagcattatgaaagtgaatcttacttttgtaaaactttatggtttgtggaaaacaaatgtttttgaacatttaaaaagttcagatgttaaaaagttgaaaggttaatgtaaaacaatcaatattaaagaattttgatgccaaaa

SEQ ID NO: 482 - DNA, 1215 bp, Homo sapiens
  source 1..1215: mol_type = genomic DNA
ccacaaatgtgggagggcgataaccactcgtagaaagcgtgagaagttactacaagcggtcctcccggccaccgtactgttccgctcccagaagccccgggcggcggaagtcgtcactcttaagaagggacggggccccacgctgcgcacccgcgggtttgctatggcgatgagcagcggcggcagtggtggcggcgtcccggagcaggaggattccgtgctgttccggcgcggcacaggccagagcgatgattctgacatttgggatgatacagcactgataaaagcatatgataaagctgtggcttcatttaagcatgctctaaagaatggtgacatttgtgaaacttcgggtaaaccaaaaaccacacctaaaagaaaacctgctaagaagaataaaagccaaaagaagaatactgcagcttccttacaacagtggaaagttggggacaaatgttctgccatttggtcagaagacggttgcatttacccagctaccattgcttcaattgattttaagagagaaacctgtgttgtggtttacactggatatggaaatagagaggagcaaaatctgtccgatctactttccccaatctgtgaagtagctaataatatagaacaaaatgctcaagagaatgaaaatgaaagccaagtttcaacagatgaaagtgagaactccaggtctcctggaaataaatcagataacatcaagcccaaatctgctccatggaactcttttctccctccaccaccccccatgccagggccaagactgggaccaggaaagccaggtctaaaattcaatggcccaccaccgccaccgccaccaccaccaccccacttactatcatgctggctgcctccatttccttctggaccaccaataattcccccaccacctcccatatgtccagattctcttgatgatgctgatgctttgggaagtatgttaatttcatggtacatgagtggctatcatactggctattatatgacagggtttcactgtgttagccaggatggtctcaatctcctgaccccgtgatccacccgcctcggccttccaagagaaatgaaatttttttaatgcacaaagatctggggtaatgtgtaccacattgaaccttggggagtatggcttcaaacttgtcactttatacgttagtctcctacggacatgttctattgtattttagtcagaacatttaaaat

SEQ ID NO: 483 - DNA, 1482 bp, Homo sapiens
  source 1..1482: mol_type = genomic DNA
gcacccgcgggtttgctatggcgatgagcagcggcggcagtggtggcggcgtcccggagcaggaggattccgtgctgttccggcgcggcacaggccagagcgatgattctgacatttgggatgatacagcactgataaaagcatatgataaagctgtggcttcatttaagcatgctctaaagaatggtgacatttgtgaaacttcgggtaaaccaaaaaccacacctaaaagaaaacctgctaagaagaataaaagccaaaagaagaatactgcagcttccttacaacagtggaaagttggggacaaatgttctgccatttggtcagaagacggttgcatttacccagctaccattgcttcaattgattttaagagagaaacctgtgttgtggtttacactggatatggaaatagagaggagcaaaatctgtccgatctactttccccaatctgtgaagtagctaataatatagaacaaaatgctcaagagaatgaaaatgaaagccaagtttcaacagatgaaagtgagaactccaggtctcctggaaataaatcagataacatcaagcccaaatctgctccatggaactcttttctccctccaccaccccccatgccagggccaagactgggaccaggaaagccaggtctaaaattcaatggcccaccaccgccaccgccaccaccaccaccccacttactatcatgctggctgcctccatttccttctggaccaccaataattcccccaccacctcccatatgtccagattctcttgatgatgctgatgctttgggaagtatgttaatttcatggtacatgagtggctatcatactggctattatatgggtttcagacaaaatcaaaaagaaggaaggtgctcacattccttaaattaaggagaaatgctggcatagagcagcactaaatgacaccactaaagaaacgatcagacagatctggaatgtgaagcgttatagaagataactggcctcatttcttcaaaatatcaagtgttgggaaagaaaaaaggaagtggaatgggtaactcttcttgattaaaagttatgtaataaccaaatgcaatgtgaaatattttactggactctattttgaaaaaccatctgtaaaagactggggtgggggtgggaggccagcacggtggtgaggcagttgagaaaatttgaatgtggattagattttgaatgatattggataattattggtaattttatgagctgtgagaagggtgttgtagtttataaaagactgtcttaatttgcatacttaagcatttaggaatgaagtgttagagtgtcttaaaatgtttcaaatggtttaacaaaatgtatgtgaggcgtatgtggcaaaatgttacagaatctaactggtggacatggctgttcattgtactgtttttttctatcttctatatgtttaaaagtatataataaaaatatttaatttttttttaaatta

SEQ ID NO: 484 - DNA, 1370 bp, Homo sapiens
  source 1..1370: mol_type = genomic DNA
ccccgggcggcggaagtcgtcactcttaagaagggacggggccccacgctgcgcacccgcgggtttgctatggcgatgagcagcggcggcagtggtggcggcgtcccggagcaggaggattccgtgctgttccggcgcggcacaggccagagcgatgattctgacatttgggatgatacagcactgataaaagcatatgataaagctgtggcttcatttaagcatgctctaaagaatggtgacatttgtgaaacttcgggtaaaccaaaaaccacacctaaaagaaaacctgctaagaagaataaaagccaaaagaagaatactgcagcttccttacaacagtggaaagttggggacaaatgttctgccatttggtcagaagacggttgcatttacccagctaccattgcttcaattgattttaagagagaaacctgtgttgtggtttacactggatatggaaatagagaggagcaaaatctgtccgatctactttccccaatctgtgaagtagctaataatatagaacagaatgctcaagagaatgaaaatgaaagccaagtttcaacagatgaaagtgagaactccaggtctcctggaaataaatcagataacatcaagcccaaatctgctccatggaactcttttctccctccaccaccccccatgccagggccaagactgggaccaggaaagccaggtctaaaattcaatggcccaccaccgccaccgccaccaccaccaccccacttactatcatgctggctgcctccatttccttctggaccaccaataattcccccaccacctcccatatgtccagattctcttgatgatgctgatgctttgggaagtatgttaatttcatggtacatgagtggctatcatactggctattatatgtttcctgaggcctccctaaaagccgagcagatgccagcaccatgcttcctgtaaagcctgcagaaccgtgagtcaactaaacctcttttctttatgaaagaaaaggaaggaagggagagagggaaggagaaaaagagagagggagagatggatggaggaagggagggagggcttacaaccatgaggacagtttttaggtcaatgagggatgacttgggagtcctatgaagactgatgtaaactagaataaagggcatgatgagcttatgattcaaaagtattttgtcatagaaatagtttgttttctgtaaaagaacacagtaaatattttagctttgtaggccactgagtctctgttgctttaaaaaatgtgaaaaccattcttagcttgagggctggacagtccagggccatactttactgaccgctgcttgaactaaacgctgttagaagcagctctggaaaaa

SEQ ID NO: 485 - DNA, 884 bp, Homo sapiens
  source 1..884: mol_type = genomic DNA
ctcccagaagccccgggcggcggaagtcgtcactcttaagaagggacggggccccacgctgcgcacccgcgggtttgctatggcgatgagcagcggcggcagtggtggcggcgtcccggagcaggaggattccgtgctgttccggcgcggcacaggccagagcgatgattctgacatttgggatgatacagcactgataaaagcatatgataaagctgtggcttcatttaagcatgctctaaagaatggtgacatttgtgaaacttcgggtaaaccaaaaaccacacctaaaagaaaacctgctaagaagaataaaagccaaaagaagaatactgcagcttccttacaacagtggaaagttggggacaaatgttctgccatttggtcagaagacggttgcatttacccagctaccattgcttcaattgattttaagagagaaacctgtgttgtggtttacactggatatggaaatagagaggagcaaaatctgtccgatctactttccccaatctgtgaagtagctaataatatagaacagaatgctcaagagaatgaaaatgaaagccaagtttcaacagatgaaagtgagaactccaggtctcctggaaataaatcagataacatcaagcccaaatctgctccatggaactcttttctccctccaccaccccccatgccagggccaagactgggaccaggaaagataattcccccaccacctcccatatgtccagattctcttgatgatgctgatgctttgggaagtatgttaatttcatggtacatgagtggctatcatactggctattatatgtttcctgaggcctccctaaaagccgagcagatgccagcaccatgcttcctgtaaagcctgcagaacc

SEQ ID NO: 486 - DNA, 664 bp, Homo sapiens
  source 1..664: mol_type = genomic DNA
gcggaagtcgtcactcttaagaagggacggggccccacgctgcgcacccgcgggtttgctatggcgatgagcagcggcggcagtggtggcggcgtcccggagcaggaggattccgtgctgttccggcgcggcacaggccagagcgatgattctgacatttgggatgatacagcactgataaaagcatatgataaagctgtggcttcatttaagcatgctctaaagaatggtgacatttgtgaaacttcgggtaaaccaaaaaccacacctaaaagaaaacctgctaagaagaataaaagccaaaagaagaatactgcagcttccttacaacagaatgaaaatgaaagccaagtttcaacagatgaaagtgagaactccaggtctcctggaaataaatcagataacatcaagcccaaatctgctccatggaactcttttctccctccaccaccccccatgccagggccaagactgggaccaggaaagataattcccccaccacctcccatatgtccagattctcttgatgatgctgatgctttgggaagtatgttaatttcatggtacatgagtggctatcatactggctattatatgtttcctgaggcctccctaaaagccgagcagatgccagcaccatgcttcctgtaaagcctgcagaacc

SEQ ID NO: 487 - DNA, 760 bp, Homo sapiens
  source 1..760: mol_type = genomic DNA
gcggaagtcgtcactcttaagaagggacggggccccacgctgcgcacccgcgggtttgctatggcgatgagcagcggcggcagtggtggcggcgtcccggagcaggaggattccgtgctgttccggcgcggcacaggccagagcgatgattctgacatttgggatgatacagcactgataaaagcatatgataaagctgtggcttcatttaagcatgctctaaagaatggtgacatttgtgaaacttcgggtaaaccaaaaaccacacctaaaagaaaacctgctaagaagaataaaagccaaaagaagaatactgcagcttccttacaacagaatgaaaatgaaagccaagtttcaacagatgaaagtgagaactccaggtctcctggaaataaatcagataacatcaagcccaaatctgctccatggaactcttttctccctccaccaccccccatgccagggccaagactgggaccaggaaagccaggtctaaaattcaatggcccaccaccgccaccgccaccaccaccaccccacttactatcatgctggctgcctccatttccttctggaccaccaataattcccccaccacctcccatatgtccagattctcttgatgatgctgatgctttgggaagtatgttaatttcatggtacatgagtggctatcatactggctattatatgtttcctgaggcctccctaaaagccgagcagatgccagcaccatgcttcctgtaaagcctgcagaacc

SEQ ID NO: 488 - DNA, 1394 bp, Homo sapiens
  source 1..1394: mol_type = genomic DNA
ctcccagaagccccgggcggcggaagtcgtcactcttaagaagggacggggccccacgctgcgcacccgcgggtttgctatggcgatgagcagcggcggcagtggtggcggcgtcccggagcaggaggattccgtgctgttccggcgcggcacaggccagagcgatgattctgacatttgggatgatacagcactgataaaagcatatgataaagctgtggcttcatttaagcatgctctaaagaatggtgacatttgtgaaacttcgggtaaaccaaaaaccacacctaaaagaaaacctgctaagaagaataaaagccaaaagaagaatactgcagcttccttacaacagtggaaagttggggacaaatgttctgccatttggtcagaagacggttgcatttacccagctaccattgcttcaattgattttaagagagaaacctgtgttgtggtttacactggatatggaaatagagaggagcaaaatctgtccgatctactttccccaatctgtgaagtagctaataatatagaacagaatgctcaagagaatgaaaatgaaagccaagtttcaacagatgaaagtgagaactccaggtctcctggaaataaatcagataacatcaagcccaaatctgctccatggaactcttttctccctccaccaccccccatgccagggccaagactgggaccaggaaagataattcccccaccacctcccatatgtccagattctcttgatgatgctgatgctttgggaagtatgttaatttcatggtacatgagtggctatcatactggctattatatggaaatgctggcatagagcagcactaaatgacaccactaaagaaacgatcagacagatctggaatgtgaagcgttatagaagataactggcctcatttcttcaaaatatcaagtgttgggaaagaaaaaaggaagtggaatgggtaactcttcttgattaaaagttatgtaataaccaaatgcaatgtgaaatattttactggactctattttgaaaaaccatctgtaaaagactggggtgggggtgggaggccagcacggtggtgaggcagttgagaaaatttgaatgtggattagattttgaatgatattggataattattggtaattttatgagctgtgagaagggtgttgtagtttataaaagactgtcttaatttgcatacttaagcatttaggaatgaagtgttagagtgtcttaaaatgtttcaaatggtttaacaaaatgtatgtgaggcgtatgtggcaaaatgttacagaatctaactggtggacatggctgttcattgtactgtttttttctatcttctatatgtttaaaagtatataataaaaatatttaatttttttttaaatta

SEQ ID NO: 489 - DNA, 1480 bp, Homo sapiens
  source 1..1480: mol_type = genomic DNA
ccccgggcggcggaagtcgtcactcttaagaagggacggggccccacgctgcgcacccgcgggtttgctatggcgatgagcagcggcggcagtggtggcggcgtcccggagcaggaggattccgtgctgttccggcgcggcacaggccagagcgatgattctgacatttgggatgatacagcactgataaaagcatatgataaagctgtggcttcatttaagcatgctctaaagaatggtgacatttgtgaaacttcgggtaaaccaaaaaccacacctaaaagaaaacctgctaagaagaataaaagccaaaagaagaatactgcagcttccttacaacagtggaaagttggggacaaatgttctgccatttggtcagaagacggttgcatttacccagctaccattgcttcaattgattttaagagagaaacctgtgttgtggtttacactggatatggaaatagagaggagcaaaatctgtccgatctactttccccaatctgtgaagtagctaataatatagaacagaatgctcaagagaatgaaaatgaaagccaagtttcaacagatgaaagtgagaactccaggtctcctggaaataaatcagataacatcaagcccaaatctgctccatggaactcttttctccctccaccaccccccatgccagggccaagactgggaccaggaaagccaggtctaaaattcaatggcccaccaccgccaccgccaccaccaccaccccacttactatcatgctggctgcctccatttccttctggaccaccaataattcccccaccacctcccatatgtccagattctcttgatgatgctgatgctttgggaagtatgttaatttcatggtacatgagtggctatcatactggctattatatggaaatgctggcatagagcagcactaaatgacaccactaaagaaacgatcagacagatctggaatgtgaagcgttatagaagataactggcctcatttcttcaaaatatcaagtgttgggaaagaaaaaaggaagtggaatgggtaactcttcttgattaaaagttatgtaataaccaaatgcaatgtgaaatattttactggactctattttgaaaaaccatctgtaaaagactggggtgggggtgggaggccagcacggtggtgaggcagttgagaaaatttgaatgtggattagattttgaatgatattggataattattggtaattttatgagctgtgagaagggtgttgtagtttataaaagactgtcttaatttgcatacttaagcatttaggaatgaagtgttagagtgtcttaaaatgtttcaaatggtttaacaaaatgtatgtgaggcgtatgtggcaaaatgttacagaatctaactggtggacatggctgttcattgtactgtttttttctatcttctatatgtttaaaagtatataataaaaatatttaatttttttttaaatta

SEQ ID NO: 490 - DNA, 1174 bp, Homo sapiens
  source 1..1174: mol_type = genomic DNA
gcggaagtcgtcactcttaagaagggacggggccccacgctgcgcacccgcgggtttgctatggcgatgagcagcggcggcagtggtggcggcgtcccggagcaggaggattccgtgctgttccggcgcggcacaggccagagcgatgattctgacatttgggatgatacagcactgataaaagcatatgataaagctgtggcttcatttaagcatgctctaaagaatggtgacatttgtgaaacttcgggtaaaccaaaaaccacacctaaaagaaaacctgctaagaagaataaaagccaaaagaagaatactgcagcttccttacaacagaatgaaaatgaaagccaagtttcaacagatgaaagtgagaactccaggtctcctggaaataaatcagataacatcaagcccaaatctgctccatggaactcttttctccctccaccaccccccatgccagggccaagactgggaccaggaaagataattcccccaccacctcccatatgtccagattctcttgatgatgctgatgctttgggaagtatgttaatttcatggtacatgagtggctatcatactggctattatatggaaatgctggcatagagcagcactaaatgacaccactaaagaaacgatcagacagatctggaatgtgaagcgttatagaagataactggcctcatttcttcaaaatatcaagtgttgggaaagaaaaaaggaagtggaatgggtaactcttcttgattaaaagttatgtaataaccaaatgcaatgtgaaatattttactggactctattttgaaaaaccatctgtaaaagactggggtgggggtgggaggccagcacggtggtgaggcagttgagaaaatttgaatgtggattagattttgaatgatattggataattattggtaattttatgagctgtgagaagggtgttgtagtttataaaagactgtcttaatttgcatacttaagcatttaggaatgaagtgttagagtgtcttaaaatgtttcaaatggtttaacaaaatgtatgtgaggcgtatgtggcaaaatgttacagaatctaactggtggacatggctgttcattgtactgtttttttctatcttctatatgtttaaaagtatataataaaaatatttaatttttttttaaatta

SEQ ID NO: 491 - DNA, 1270 bp, Homo sapiens
  source 1..1270: mol_type = genomic DNA
gcggaagtcgtcactcttaagaagggacggggccccacgctgcgcacccgcgggtttgctatggcgatgagcagcggcggcagtggtggcggcgtcccggagcaggaggattccgtgctgttccggcgcggcacaggccagagcgatgattctgacatttgggatgatacagcactgataaaagcatatgataaagctgtggcttcatttaagcatgctctaaagaatggtgacatttgtgaaacttcgggtaaaccaaaaaccacacctaaaagaaaacctgctaagaagaataaaagccaaaagaagaatactgcagcttccttacaacagaatgaaaatgaaagccaagtttcaacagatgaaagtgagaactccaggtctcctggaaataaatcagataacatcaagcccaaatctgctccatggaactcttttctccctccaccaccccccatgccagggccaagactgggaccaggaaagccaggtctaaaattcaatggcccaccaccgccaccgccaccaccaccaccccacttactatcatgctggctgcctccatttccttctggaccaccaataattcccccaccacctcccatatgtccagattctcttgatgatgctgatgctttgggaagtatgttaatttcatggtacatgagtggctatcatactggctattatatggaaatgctggcatagagcagcactaaatgacaccactaaagaaacgatcagacagatctggaatgtgaagcgttatagaagataactggcctcatttcttcaaaatatcaagtgttgggaaagaaaaaaggaagtggaatgggtaactcttcttgattaaaagttatgtaataaccaaatgcaatgtgaaatattttactggactctattttgaaaaaccatctgtaaaagactggggtgggggtgggaggccagcacggtggtgaggcagttgagaaaatttgaatgtggattagattttgaatgatattggataattattggtaattttatgagctgtgagaagggtgttgtagtttataaaagactgtcttaatttgcatacttaagcatttaggaatgaagtgttagagtgtcttaaaatgtttcaaatggtttaacaaaatgtatgtgaggcgtatgtggcaaaatgttacagaatctaactggtggacatggctgttcattgtactgtttttttctatcttctatatgtttaaaagtatataataaaaatatttaatttttttttaaatta

SEQ ID NO: 492 - DNA, 920 bp, Homo sapiens
  source 1..920: mol_type = genomic DNA
ctcccagaagccccgggcggcggaagtcgtcactcttaagaagggacggggccccacgctgcgcacccgcgggtttgctatggcgatgagcagcggcggcagtggtggcggcgtcccggagcaggaggattccgtgctgttccggcgcggcacaggccagagcgatgattctgacatttgggatgatacagcactgataaaagcatatgataaagctgtggcttcatttaagcatgctctaaagaatggtgacatttgtgaaacttcgggtaaaccaaaaaccacacctaaaagaaaacctgctaagaagaataaaagccaaaagaagaatactgcagcttccttacaacagtggaaagttggggacaaatgttctgccatttggtcagaagacggttgcatttacccagctaccattgcttcaattgattttaagagagaaacctgtgttgtggtttacactggatatggaaatagagaggagcaaaatctgtccgatctactttccccaatctgtgaagtagctaataatatagaacagaatgctcaagagaatgaaaatgaaagccaagtttcaacagatgaaagtgagaactccaggtctcctggaaataaatcagataacatcaagcccaaatctgctccatggaactcttttctccctccaccaccccccatgccagggccaagactgggaccaggaaagataattcccccaccacctcccatatgtccagattctcttgatgatgctgatgctttgggaagtatgttaatttcatggtacatgagtggctatcatactggctattatatgggtttcagacaaaatcaaaaagaaggaaggtgctcacattccttaaattaaggagaaatgctggcatagagcagcactaaatgacaccactaaagaaacgatc

SEQ ID NO: 493 - DNA, 1006 bp, Homo sapiens
  source 1..1006: mol_type = genomic DNA
ccccgggcggcggaagtcgtcactcttaagaagggacggggccccacgctgcgcacccgcgggtttgctatggcgatgagcagcggcggcagtggtggcggcgtcccggagcaggaggattccgtgctgttccggcgcggcacaggccagagcgatgattctgacatttgggatgatacagcactgataaaagcatatgataaagctgtggcttcatttaagcatgctctaaagaatggtgacatttgtgaaacttcgggtaaaccaaaaaccacacctaaaagaaaacctgctaagaagaataaaagccaaaagaagaatactgcagcttccttacaacagtggaaagttggggacaaatgttctgccatttggtcagaagacggttgcatttacccagctaccattgcttcaattgattttaagagagaaacctgtgttgtggtttacactggatatggaaatagagaggagcaaaatctgtccgatctactttccccaatctgtgaagtagctaataatatagaacagaatgctcaagagaatgaaaatgaaagccaagtttcaacagatgaaagtgagaactccaggtctcctggaaataaatcagataacatcaagcccaaatctgctccatggaactcttttctccctccaccaccccccatgccagggccaagactgggaccaggaaagccaggtctaaaattcaatggcccaccaccgccaccgccaccaccaccaccccacttactatcatgctggctgcctccatttccttctggaccaccaataattcccccaccacctcccatatgtccagattctcttgatgatgctgatgctttgggaagtatgttaatttcatggtacatgagtggctatcatactggctattatatgggtttcagacaaaatcaaaaagaaggaaggtgctcacattccttaaattaaggagaaatgctggcatagagcagcactaaatgacaccactaaagaaacgatc

SEQ ID NO: 494 - DNA, 700 bp, Homo sapiens
  source 1..700: mol_type = genomic DNA
gcggaagtcgtcactcttaagaagggacggggccccacgctgcgcacccgcgggtttgctatggcgatgagcagcggcggcagtggtggcggcgtcccggagcaggaggattccgtgctgttccggcgcggcacaggccagagcgatgattctgacatttgggatgatacagcactgataaaagcatatgataaagctgtggcttcatttaagcatgctctaaagaatggtgacatttgtgaaacttcgggtaaaccaaaaaccacacctaaaagaaaacctgctaagaagaataaaagccaaaagaagaatactgcagcttccttacaacagaatgaaaatgaaagccaagtttcaacagatgaaagtgagaactccaggtctcctggaaataaatcagataacatcaagcccaaatctgctccatggaactcttttctccctccaccaccccccatgccagggccaagactgggaccaggaaagataattcccccaccacctcccatatgtccagattctcttgatgatgctgatgctttgggaagtatgttaatttcatggtacatgagtggctatcatactggctattatatgggtttcagacaaaatcaaaaagaaggaaggtgctcacattccttaaattaaggagaaatgctggcatagagcagcactaaatgacaccactaaagaaacgatc

SEQ ID NO: 495 - DNA, 796 bp, Homo sapiens
  source 1..796: mol_type = genomic DNA
gcggaagtcgtcactcttaagaagggacggggccccacgctgcgcacccgcgggtttgctatggcgatgagcagcggcggcagtggtggcggcgtcccggagcaggaggattccgtgctgttccggcgcggcacaggccagagcgatgattctgacatttgggatgatacagcactgataaaagcatatgataaagctgtggcttcatttaagcatgctctaaagaatggtgacatttgtgaaacttcgggtaaaccaaaaaccacacctaaaagaaaacctgctaagaagaataaaagccaaaagaagaatactgcagcttccttacaacagaatgaaaatgaaagccaagtttcaacagatgaaagtgagaactccaggtctcctggaaataaatcagataacatcaagcccaaatctgctccatggaactcttttctccctccaccaccccccatgccagggccaagactgggaccaggaaagccaggtctaaaattcaatggcccaccaccgccaccgccaccaccaccaccccacttactatcatgctggctgcctccatttccttctggaccaccaataattcccccaccacctcccatatgtccagattctcttgatgatgctgatgctttgggaagtatgttaatttcatggtacatgagtggctatcatactggctattatatgggtttcagacaaaatcaaaaagaaggaaggtgctcacattccttaaattaaggagaaatgctggcatagagcagcactaaatgacaccactaaagaaacgatc

SEQ ID NO: 496 - DNA, 1121 bp, Homo sapiens
  source 1..1121: mol_type = genomic DNA
ccccgggcggcggaagtcgtcactcttaagaagggacggggccccacgctgcgcacccgcgggtttgctatggcgatgagcagcggcggcagtggtggcggcgtcccggagcaggaggattccgtgctgttccggcgcggcacaggccagagcgatgattctgacatttgggatgatacagcactgataaaagcatatgataaagctgtggcttcatttaagcatgctctaaagaatggtgacatttgtgaaacttcgggtaaaccaaaaaccacacctaaaagaaaacctgctaagaagaataaaagccaaaagaagaatactgcagcttccttacaacagtggaaagttggggacaaatgttctgccatttggtcagaagacggttgcatttacccagctaccattgcttcaattgattttaagagagaaacctgtgttgtggtttacactggatatggaaatagagaggagcaaaatctgtccgatctactttccccaatctgtgaagtagctaataatatagaacagaatgctcaagagaatgaaaatgaaagccaagtttcaacagatgaaagtgagaactccaggtctcctggaaataaatcagataacatcaagcccaaatctgctccatggaactcttttctccctccaccaccccccatgccagggccaagactgggaccaggaaagccaggtctaaaattcaatggcccaccaccgccaccgccaccaccaccaccccacttactatcatgctggctgcctccatttccttctggaccaccaataattcccccaccacctcccatatgtccagattctcttgatgatgctgatgctttgggaagtatgttaatttcatggtacatgagtggctatcatactggctattatatgacagggtttcactgtgttagccaggatggtctcaatctcctgaccccgtgatccacccgcctcggccttccaagagaaatgaaatttttttaatgcacaaagatctggggtaatgtgtaccacattgaaccttggggagtatggcttcaaacttgtcactttatacgttagtctcctacggacatgttctattgtattttagtcagaacatttaaaat

SEQ ID NO: 497 - DNA, 6986 bp, Homo sapiens
  source 1..6986: mol_type = genomic DNA
agggcggagcgggcggcagacccggagcagcatgtggactctcgggcgccgcgcagtagccggcctcctggcgtcacccagcccagcccaggcccagaccctcacccgggtcccgcggccggcagagttggccccactctgcggccgccgtggcctgcgcaccgacatcgatgcgacctgcacgccccgccgcgcaagttcgaaccaacgtggcctcaaccagatttggaatgtcaaaaagcagagtgtctatttgatgaatttgaggaaatctggaactttgggccacccaggctctctagatgagaccacctatgaaagactagcagaggaaacgctggactctttagcagagttttttgaagaccttgcagacaagccatacacgtttgaggactatgatgtctcctttgggagtggtgtcttaactgtcaaactgggtggagatctaggaacctatgtgatcaacaagcagacgccaaacaagcaaatctggctatcttctccatccaggtatgtagtggacctaagcgttatgactggactgggaaaaactgggtgtactcccacgacggcgtgtccctccatgagctgctggccgcagagctcactaaagccttaaaaaccaaactggacttgtcttccttggcctattccggaaaagatgcttgatgcccagccccgttttaaggacattaaaagctatcaggccaagaccccagcttcattatgcagctgaggtctgttttttgttgttgttgttgtttattttttttattcctgcttttgaggacagttgggctatgtgtcacagctctgtagaaagaatgtgttgcctcctaccttgcccccaagttctgatttttaatttctatggaagattttttggattgtcggatttcctccctcacatgataccccttatcttttataatgtcttatgcctatacctgaatataacaacctttaaaaaagcaaaataataagaaggaaaaattccaggagggaaaatgaattgtcttcactcttcattctttgaaggatttactgcaagaagtacatgaagagcagctggtcaacctgctcactgttctatctccaaatgagacacattaaagggtagcctacaaatgttttcaggcttctttcaaagtgtaagcacttctgagctctttagcattgaagtgtcgaaagcaactcacacgggaagatcatttcttatttgtgctctgtgactgccaaggtgtggcctgcactgggttgtccagggagacctagtgctgtttctcccacatattcacatacgtgtctgtgtgtatatatattttttcaatttaaaggttagtatggaatcagctgctacaagaatgcaaaaaatcttccaaagacaagaaaagaggaaaaaaagccgttttcatgagctgagtgatgtagcgtaacaaacaaaatcatggagctgaggaggtgccttgtaaacatgaaggggcagataaaggaaggagatactcatgttgataaagagagccctggtcctagacatagttcagccacaaagtagttgtccctttgtggacaagtttcccaaattccctggacctctgcttccccatctgttaaatgagagaatagagtatggttgattcccagcattcagtggtcctgtcaagcaacctaacaggctagttctaattccctattgggtagatgaggggatgacaaagaacagtttttaagctatataggaaacattgttattggtgttgccctatcgtgatttcagttgaattcatgtgaaaataatagccatccttggcctggcgcggtggctcacacctgtaatcccagcacttttggaggccaaggtgggtggatcacctgaggtcaggagttcaagaccagcctggccaacatgatgaaaccccgtctctactaaaaatacaaaaaattagccgggcatgatggcaggtgcctgtaatcccagctacttgggaggctgaagcggaagaatcgcttgaacccagaggtggaggttgcagtgagccgagatcgtgccattgcactgtaacctgggtgactgagcaaaactctgtctcaaaataataataacaatataataataataatagccatcctttattgtacccttactgggttaatcgtattataccacattacctcattttaatttttactgacctgcactttatacaaagcaacaagcctccaggacattaaaattcatgcaaagttatgctcatgttatattattttcttacttaaagaaggatttattagtggctgggcatggtggcgtgcacctgtaatcccaggtactcaggaggctgagacgggagaattgcttgaccccaggcggaggaggttacagtgagtcgagatcgtacctgagcgacagagcgagactccgtctcaaaaaaaaaaaaaaggagggtttattaatgagaagtttgtattaatatgtagcaaaggcttttccaatgggtgaataaaaacacattccattaagtcaagctgggagcagtggcatatacctatagtcccagctgcacaggaggctgagacaggaggattgcttgaagccaggaattggagatcagcctgggcaacacagcaagatcctatctcttaaaaaaagaaaaaaaaacctattaataataaaacagtataaacaaaagctaaataggtaaaatattttttctgaaataaaattattttttgagtctgatggaaatgtttaagtgcagtaggccagtgccagtgagaaaataaataacatcatacatgtttgtatgtgtttgcatcttgcttctactgaaagtttcagtgcaccccacttacttagaactcggtgacatgatgtactcctttatctgggacacagcacaaaagaggtatgcagtggggctgctctgacatgaaagtggaagttaaggaatctgggctcttatggggtccttgtgggccagcccttcaggcctattttactttcattttacatatagctctaattggtttgattatctcgttcccaaggcagtgggagatccccatttaaggaaagaaaaggggcctggcacagtggctcatgcctgtaatcccagcactttgggaggctgaggcaagtgtatcacctgaggtcaggagttcaagaccagcctggccaacatggcaaaatcccgtctctactaaaaatattaaaaaattggctgggcgtggtggttcgtgcctataatttcagctactcaggaggctgaggcaggagaatcgctgtaacctggggggtggaggttgcagtgagacgagatcatgccacttcactccagcctggccaacagagccatactccgtctcaaataaataaataaataaataaagggacttcaaacacatgaacagcagccaggggaagaatcaaaatcatattctgtcaagcaaactggaaaagtaccactgtgtgtaccaatagcctccccaccacagaccctgggagcatcgcctcatttatggtgtggtccagtcatccatgtgaaggatgagtttccaggaaaaggttattaaatattcactgtaacatactggaggaggtgaggaattgcataatacaatcttagaaaacttttttttcccctttctattttttgagacaggatctcactttggcactcaggctggaggacagtggtacaatcaaagctcatggcagcctcgacctccctgggcttgggcaatcctcccacaggtgtgcacctccatagctggctaatttgtgtattttttgtagagatggggtttcaccatgttgcccaggctggtctctaacacttaggctcaagtgatccacctgcctcgtcctcccaagatgctgggattacaggtgtgtgccacaggtgttcatcagaaagctttttctattatttttaccttcttgagtgggtagaacctcagccacatagaaaataaaatgttctggcatgacttatttagctctctggaattacaaagaaggaatgaggtgtgtaaaagagaacctgggtttttgaatcacaaatttagaatttaatcgaaactctgcctcttacttgtttgtagacactgacagtggcctcatgttttttttttttttaatctataaaatggagatatctaacatgttgagcctgggcccacaggcaaagcacaatcctgatgtgagaagtactcagttcatgacaactgttgttctcacatgcatagcataatttcatattcacattggaggacttctcccaaaatatggatgacgttccctactcaaccttgaacttaatcaaaatactcagtttacttaacttcgtattagattctgattccctggaaccatttatcgtgtgccttaccatgcttatattttacttgatcttttgcataccttctaaaactattttagccaatttaaaatttgacagtttgcattaaattataggtttacaatatgctttatccagctatacctgccccaaattctgacagatgcttttgccacctctaaaggaagacccatgttcatagtgatggagtttgtgtggactaaccatgcaaggttgccaaggaaaaatcgctttacgcttccaaggtacacactaagatgaaagtaattttagtccgtgtccagttggattcttggcacatagttatcttctgctagaacaaactaaaacagctacatgccagcaagggagaaaggggaaggaggggcaaagttttgaaatttcatgtaaatttatgctgttcaaaacgacgagttcatgactttgtgtatagagtaagaaatgccttttcttttttgagacagagtcttgctctgtcacccaggctggagtgcagtggcacgatctgggctcactacaacctccgcctcctgggttcaagcaattctctgcctcagcctcccgagtagctgggattacaggtgcctgccaccacacccggctaatttttgtatttttagtagagacggggtttcaccatcatggccaggctggtcttgaactcctgacctagtaatccacctgcctccgcctcccaaagtgctgggattacaggcgtgagccactgcacccagccagaaatgccttctaatctttggtttatcttaattagccaggacacttggagtgcatcccgaagtacctgatcagtggcccctttggaatgtgtaaaactcagctcacttatatccctgcatccgctacagagacagaatccaagctcatatgttccatcttctctggctgtatagtttaaggaatggaaggcaccagaacagatttattgaaatgtttattagctgaagatttatttagacagttgaggaaaacatcagcacccagcagtaaaattggctctcaaagattttcttctcctgtggaaagtcagacctctgaggccccatccaggtagaagtactagtgcaagaagggcctctgctgtccacttgtgtttctgtgatctgtgggaacattgttaacgccacatcttgacctcaaattgtttagctcctggccagacacggtggctcacacctgtaatcccagcactttgagaggctgaggcaggtggatcacctgaggttaggagttcgaggccagcctggtcaacatggtaaaaccccgcctctactaaaaatacaaaaattagctggccgtagtggcgcacgcctgttatcccagctactcgggaggctgaggcaggagaattgcttgaacctgggtggtggaggttgcagtgagccgagattacaccactgcactccagcctgggtgacaagagggaaactccattaaaaaaatgtaattcccgtgtctgccatcttaagtgtaaaggtggctaaattatatagaaaaataagacaatatcatttcccaattacattcctttcctaccgcactctatgatgctagctgagatttttccaaaagaaaatggcttaaataaaaccctaagagaaagaaaaactttaaatccctccaaagctcaaaagtaatagaaacagatgagtttggagtcaggatttctctgtaagattgcctaggctgtgtactgcacatctccaggtgccactgttgacagagattataactacaatgtgaagtgaatggtgccactgacagttatgcaaaccgtccagagcatagccacctgatcctgctgggattcctcttgccagtccatcagcagttccccttgaaagtttcaccaaacatcccttaaatctgccctctcctgcccgtccccagtggaggtcctcatcatttttcacctgcatttttgcaggagctttcttatatccaccttcctccttttctctcagcccatcatctagctacacagtctccagggtaagctttcagaaaggcaatctcttgtctgtaaaacctaagcaggaccaaggccaagtttcttagcctgaaaaatgtgcttttctgactgaactgttcaggcactgactctacatataattatgcttttctaccccctcacactcaacactttgactccagcaatcccaaatccccagatccctaagtgtgctgtgctattttcacgtggctctcagacttggccagtgctgtttccattttggtctttattccccacatctctgcctggggggtagattctaccctgaaaaatgttcttggcacagccttgcaaactcctcctccactcagcctctgcctggatgcccttgattgttccatgtcctcagcataccatgtttgtctttcccagcactgacctaccatgtgtcacccctgcttggctgtaccttccatgaggctaggactatgtgtctcctttgttgactgctgttgccctagcatcttgcacagttccttgcacacaattagagctctataaatgtcaaataaatgtgttataattatatgtttaagatagttgttcaaataaactctaaataaccccaa

SEQ ID NO: 498 - DNA, 6978 bp, Homo sapiens
  source 1..6978: mol_type = genomic DNA
agggcggagcgggcggcagacccggagcagcatgtggactctcgggcgccgcgcagtagccggcctcctggcgtcacccagcccagcccaggcccagaccctcacccgggtcccgcggccggcagagttggccccactctgcggccgccgtggcctgcgcaccgacatcgatgcgacctgcacgccccgccgcgcaagttcgaaccaacgtggcctcaaccagatttggaatgtcaaaaagcagagtgtctatttgatgaatttgaggaaatctggaactttgggccacccaggctctctagatgagaccacctatgaaagactagcagaggaaacgctggactctttagcagagttttttgaagaccttgcagacaagccatacacgtttgaggactatgatgtctcctttgggagtggtgtcttaactgtcaaactgggtggagatctaggaacctatgtgatcaacaagcagacgccaaacaagcaaatctggctatcttctccatccagtggacctaagcgttatgactggactgggaaaaactgggtgtactcccacgacggcgtgtccctccatgagctgctggccgcagagctcactaaagccttaaaaaccaaactggacttgtcttccttggcctattccggaaaagatgcttgatgcccagccccgttttaaggacattaaaagctatcaggccaagaccccagcttcattatgcagctgaggtctgttttttgttgttgttgttgtttattttttttattcctgcttttgaggacagttgggctatgtgtcacagctctgtagaaagaatgtgttgcctcctaccttgcccccaagttctgatttttaatttctatggaagattttttggattgtcggatttcctccctcacatgataccccttatcttttataatgtcttatgcctatacctgaatataacaacctttaaaaaagcaaaataataagaaggaaaaattccaggagggaaaatgaattgtcttcactcttcattctttgaaggatttactgcaagaagtacatgaagagcagctggtcaacctgctcactgttctatctccaaatgagacacattaaagggtagcctacaaatgttttcaggcttctttcaaagtgtaagcacttctgagctctttagcattgaagtgtcgaaagcaactcacacgggaagatcatttcttatttgtgctctgtgactgccaaggtgtggcctgcactgggttgtccagggagacctagtgctgtttctcccacatattcacatacgtgtctgtgtgtatatatattttttcaatttaaaggttagtatggaatcagctgctacaagaatgcaaaaaatcttccaaagacaagaaaagaggaaaaaaagccgttttcatgagctgagtgatgtagcgtaacaaacaaaatcatggagctgaggaggtgccttgtaaacatgaaggggcagataaaggaaggagatactcatgttgataaagagagccctggtcctagacatagttcagccacaaagtagttgtccctttgtggacaagtttcccaaattccctggacctctgcttccccatctgttaaatgagagaatagagtatggttgattcccagcattcagtggtcctgtcaagcaacctaacaggctagttctaattccctattgggtagatgaggggatgacaaagaacagtttttaagctatataggaaacattgttattggtgttgccctatcgtgatttcagttgaattcatgtgaaaataatagccatccttggcctggcgcggtggctcacacctgtaatcccagcacttttggaggccaaggtgggtggatcacctgaggtcaggagttcaagaccagcctggccaacatgatgaaaccccgtctctactaaaaatacaaaaaattagccgggcatgatggcaggtgcctgtaatcccagctacttgggaggctgaagcggaagaatcgcttgaacccagaggtggaggttgcagtgagccgagatcgtgccattgcactgtaacctgggtgactgagcaaaactctgtctcaaaataataataacaatataataataataatagccatcctttattgtacccttactgggttaatcgtattataccacattacctcattttaatttttactgacctgcactttatacaaagcaacaagcctccaggacattaaaattcatgcaaagttatgctcatgttatattattttcttacttaaagaaggatttattagtggctgggcatggtggcgtgcacctgtaatcccaggtactcaggaggctgagacgggagaattgcttgaccccaggcggaggaggttacagtgagtcgagatcgtacctgagcgacagagcgagactccgtctcaaaaaaaaaaaaaaggagggtttattaatgagaagtttgtattaatatgtagcaaaggcttttccaatgggtgaataaaaacacattccattaagtcaagctgggagcagtggcatatacctatagtcccagctgcacaggaggctgagacaggaggattgcttgaagccaggaattggagatcagcctgggcaacacagcaagatcctatctcttaaaaaaagaaaaaaaaacctattaataataaaacagtataaacaaaagctaaataggtaaaatattttttctgaaataaaattattttttgagtctgatggaaatgtttaagtgcagtaggccagtgccagtgagaaaataaataacatcatacatgtttgtatgtgtttgcatcttgcttctactgaaagtttcagtgcaccccacttacttagaactcggtgacatgatgtactcctttatctgggacacagcacaaaagaggtatgcagtggggctgctctgacatgaaagtggaagttaaggaatctgggctcttatggggtccttgtgggccagcccttcaggcctattttactttcattttacatatagctctaattggtttgattatctcgttcccaaggcagtgggagatccccatttaaggaaagaaaaggggcctggcacagtggctcatgcctgtaatcccagcactttgggaggctgaggcaagtgtatcacctgaggtcaggagttcaagaccagcctggccaacatggcaaaatcccgtctctactaaaaatattaaaaaattggctgggcgtggtggttcgtgcctataatttcagctactcaggaggctgaggcaggagaatcgctgtaacctggggggtggaggttgcagtgagacgagatcatgccacttcactccagcctggccaacagagccatactccgtctcaaataaataaataaataaataaagggacttcaaacacatgaacagcagccaggggaagaatcaaaatcatattctgtcaagcaaactggaaaagtaccactgtgtgtaccaatagcctccccaccacagaccctgggagcatcgcctcatttatggtgtggtccagtcatccatgtgaaggatgagtttccaggaaaaggttattaaatattcactgtaacatactggaggaggtgaggaattgcataatacaatcttagaaaacttttttttcccctttctattttttgagacaggatctcactttggcactcaggctggaggacagtggtacaatcaaagctcatggcagcctcgacctccctgggcttgggcaatcctcccacaggtgtgcacctccatagctggctaatttgtgtattttttgtagagatggggtttcaccatgttgcccaggctggtctctaacacttaggctcaagtgatccacctgcctcgtcctcccaagatgctgggattacaggtgtgtgccacaggtgttcatcagaaagctttttctattatttttaccttcttgagtgggtagaacctcagccacatagaaaataaaatgttctggcatgacttatttagctctctggaattacaaagaaggaatgaggtgtgtaaaagagaacctgggtttttgaatcacaaatttagaatttaatcgaaactctgcctcttacttgtttgtagacactgacagtggcctcatgttttttttttttttaatctataaaatggagatatctaacatgttgagcctgggcccacaggcaaagcacaatcctgatgtgagaagtactcagttcatgacaactgttgttctcacatgcatagcataatttcatattcacattggaggacttctcccaaaatatggatgacgttccctactcaaccttgaacttaatcaaaatactcagtttacttaacttcgtattagattctgattccctggaaccatttatcgtgtgccttaccatgcttatattttacttgatcttttgcataccttctaaaactattttagccaatttaaaatttgacagtttgcattaaattataggtttacaatatgctttatccagctatacctgccccaaattctgacagatgcttttgccacctctaaaggaagacccatgttcatagtgatggagtttgtgtggactaaccatgcaaggttgccaaggaaaaatcgctttacgcttccaaggtacacactaagatgaaagtaattttagtccgtgtccagttggattcttggcacatagttatcttctgctagaacaaactaaaacagctacatgccagcaagggagaaaggggaaggaggggcaaagttttgaaatttcatgtaaatttatgctgttcaaaacgacgagttcatgactttgtgtatagagtaagaaatgccttttcttttttgagacagagtcttgctctgtcacccaggctggagtgcagtggcacgatctgggctcactacaacctccgcctcctgggttcaagcaattctctgcctcagcctcccgagtagctgggattacaggtgcctgccaccacacccggctaatttttgtatttttagtagagacggggtttcaccatcatggccaggctggtcttgaactcctgacctagtaatccacctgcctccgcctcccaaagtgctgggattacaggcgtgagccactgcacccagccagaaatgccttctaatctttggtttatcttaattagccaggacacttggagtgcatcccgaagtacctgatcagtggcccctttggaatgtgtaaaactcagctcacttatatccctgcatccgctacagagacagaatccaagctcatatgttccatcttctctggctgtatagtttaaggaatggaaggcaccagaacagatttattgaaatgtttattagctgaagatttatttagacagttgaggaaaacatcagcacccagcagtaaaattggctctcaaagattttcttctcctgtggaaagtcagacctctgaggccccatccaggtagaagtactagtgcaagaagggcctctgctgtccacttgtgtttctgtgatctgtgggaacattgttaacgccacatcttgacctcaaattgtttagctcctggccagacacggtggctcacacctgtaatcccagcactttgagaggctgaggcaggtggatcacctgaggttaggagttcgaggccagcctggtcaacatggtaaaaccccgcctctactaaaaatacaaaaattagctggccgtagtggcgcacgcctgttatcccagctactcgggaggctgaggcaggagaattgcttgaacctgggtggtggaggttgcagtgagccgagattacaccactgcactccagcctgggtgacaagagggaaactccattaaaaaaatgtaattcccgtgtctgccatcttaagtgtaaaggtggctaaattatatagaaaaataagacaatatcatttcccaattacattcctttcctaccgcactctatgatgctagctgagatttttccaaaagaaaatggcttaaataaaaccctaagagaaagaaaaactttaaatccctccaaagctcaaaagtaatagaaacagatgagtttggagtcaggatttctctgtaagattgcctaggctgtgtactgcacatctccaggtgccactgttgacagagattataactacaatgtgaagtgaatggtgccactgacagttatgcaaaccgtccagagcatagccacctgatcctgctgggattcctcttgccagtccatcagcagttccccttgaaagtttcaccaaacatcccttaaatctgccctctcctgcccgtccccagtggaggtcctcatcatttttcacctgcatttttgcaggagctttcttatatccaccttcctccttttctctcagcccatcatctagctacacagtctccagggtaagctttcagaaaggcaatctcttgtctgtaaaacctaagcaggaccaaggccaagtttcttagcctgaaaaatgtgcttttctgactgaactgttcaggcactgactctacatataattatgcttttctaccccctcacactcaacactttgactccagcaatcccaaatccccagatccctaagtgtgctgtgctattttcacgtggctctcagacttggccagtgctgtttccattttggtctttattccccacatctctgcctggggggtagattctaccctgaaaaatgttcttggcacagccttgcaaactcctcctccactcagcctctgcctggatgcccttgattgttccatgtcctcagcataccatgtttgtctttcccagcactgacctaccatgtgtcacccctgcttggctgtaccttccatgaggctaggactatgtgtctcctttgttgactgctgttgccctagcatcttgcacagttccttgcacacaattagagctctataaatgtcaaataaatgtgttataattatatgtttaagatagttgttcaaataaactctaaataaccccaa

SEQ ID NO: 499 - DNA, 983 bp, Homo sapiens
  source 1..983: mol_type = genomic DNA
actctgcttctgcccttggctggggaagggtggcatggagcctctccggctgctcatcttactctttgtcacagagctgtccggagcccacaacaccacagtgttccagggcgtggcgggccagtccctgcaggtgtcttgcccctatgactccatgaagcactgggggaggcgcaaggcctggtgccgccagctgggagagaagggcccatgccagcgtgtggtcagcacgcacaacttgtggctgctgtccttcctgaggaggtggaatgggagcacagccatcacagacgataccctgggtggcactctcaccattacgctgcggaatctacaaccccatgatgcgggtctctaccagtgccagagcctccatggcagtgaggctgacaccctcaggaaggtcctggtggaggtgctggcagaccccctggatcaccgggatgctggagatctctggttccccggggagtctgagagcttcgaggatgcccatgtggagcacagcatctccaggagcctcttggaaggagaaatccccttcccacccacttccatccttctcctcctggcctgcatctttctcatcaagattctagcagccagcgccctctgggctgcagcctggcatggacagaagccagggacacatccacccagtgaactggactgtggccatgacccagggtatcagctccaaactctgccagggctgagagacacgtgaaggaagatgatgggaggaaaagcccaggagaagtcccaccagggaccagcccagcctgcatacttgccacttggccaccaggactccttgttctgctctggcaagagactactctgcctgaacactgcttctcctggaccctggaagcagggactggttgagggagtggggaggtggtaagaacacctgacaacttctgaatattggacattttaaacacttacaaataaatccaagactgtcatatttagctgga

SEQ ID NO: 500 - DNA, 789 bp, Homo sapiens
  source 1..789: mol_type = genomic DNA
actctgcttctgcccttggctggggaagggtggcatggagcctctccggctgctcatcttactctttgtcacagagctgtccggagcccacaacaccacagtgttccagggcgtggcgggccagtccctgcaggtgtcttgcccctatgactccatgaagcactgggggaggcgcaaggcctggtgccgccagctgggagagaagggcccatgccagcgtgtggtcagcacgcacaacttgtggctgctgtccttcctgaggaggtggaatgggagcacagccatcacagacgataccctgggtggcactctcaccattacgctgcggaatctacaaccccatgatgcgggtctctaccagtgccagagcctccatggcagtgaggctgacaccctcaggaaggtcctggtggaggtgctggcagaccccctggatcaccgggatgctggagatctctggttccccggggagtctgagagcttcgaggatgcccatgtggagcacagcatctccagggctgagagacacgtgaaggaagatgatgggaggaaaagcccaggagaagtcccaccagggaccagcccagcctgcatacttgccacttggccaccaggactccttgttctgctctggcaagagactactctgcctgaacactgcttctcctggaccctggaagcagggactggttgagggagtggggaggtggtaagaacacctgacaacttctgaatattggacattttaaacacttacaaataaatccaagactgtcatatttagctgga

SEQ ID NO: 501 - DNA, 1166 bp, Homo sapiens
  source 1..1166: mol_type = genomic DNA
ctactcagccccagcggaggtgaaggacgtccttccccaggagccgactggccaatcacaggcaggaagatgaaggttctgtgggctgcgttgctggtcacattcctggcaggatgccaggccaaggtggagcaagcggtggagacagagccggagcccgagctgcgccagcagaccgagtggcagagcggccagcgctgggaactggcactgggtcgcttttgggattacctgcgctgggtgcagacactgtctgagcaggtgcaggaggagctgctcagctcccaggtcacccaggaactgagggcgctgatggacgagaccatgaaggagttgaaggcctacaaatcggaactggaggaacaactgaccccggtggcggaggagacgcgggcacggctgtccaaggagctgcaggcggcgcaggcccggctgggcgcggacatggaggacgtgtgcggccgcctggtgcagtaccgcggcgaggtgcaggccatgctcggccagagcaccgaggagctgcgggtgcgcctcgcctcccacctgcgcaagctgcgtaagcggctcctccgcgatgccgatgacctgcagaagcgcctggcagtgtaccaggccggggcccgcgagggcgccgagcgcggcctcagcgccatccgcgagcgcctggggcccctggtggaacagggccgcgtgcgggccgccactgtgggctccctggccggccagccgctacaggagcgggcccaggcctggggcgagcggctgcgcgcgcggatggaggagatgggcagccggacccgcgaccgcctggacgaggtgaaggagcaggtggcggaggtgcgcgccaagctggaggagcaggcccagcagatacgcctgcaggccgaggccttccaggcccgcctcaagagctggttcgagcccctggtggaagacatgcagcgccagtgggccgggctggtggagaaggtgcaggctgccgtgggcaccagcgccgcccctgtgcccagcgacaatcactgaacgccgaagcctgcagccatgcgaccccacgccaccccgtgcctcctgcctccgcgcagcctgcagcgggagaccctgtccccgccccagccgtcctcctggggtggaccctagtttaataaagattcaccaagtttcacgca

SEQ ID NO: 502 - DNA, 1248 bp, Homo sapiens
  source 1..1248: mol_type = genomic DNA
ctactcagccccagcggaggtgaaggacgtccttccccaggagccggtgagaagcgcagtcgggggcacggggatgagctcaggggcctctagaaagagctgggaccctgggaacccctggcctccagactggccaatcacaggcaggaagatgaaggttctgtgggctgcgttgctggtcacattcctggcaggatgccaggccaaggtggagcaagcggtggagacagagccggagcccgagctgcgccagcagaccgagtggcagagcggccagcgctgggaactggcactgggtcgcttttgggattacctgcgctgggtgcagacactgtctgagcaggtgcaggaggagctgctcagctcccaggtcacccaggaactgagggcgctgatggacgagaccatgaaggagttgaaggcctacaaatcggaactggaggaacaactgaccccggtggcggaggagacgcgggcacggctgtccaaggagctgcaggcggcgcaggcccggctgggcgcggacatggaggacgtgtgcggccgcctggtgcagtaccgcggcgaggtgcaggccatgctcggccagagcaccgaggagctgcgggtgcgcctcgcctcccacctgcgcaagctgcgtaagcggctcctccgcgatgccgatgacctgcagaagcgcctggcagtgtaccaggccggggcccgcgagggcgccgagcgcggcctcagcgccatccgcgagcgcctggggcccctggtggaacagggccgcgtgcgggccgccactgtgggctccctggccggccagccgctacaggagcgggcccaggcctggggcgagcggctgcgcgcgcggatggaggagatgggcagccggacccgcgaccgcctggacgaggtgaaggagcaggtggcggaggtgcgcgccaagctggaggagcaggcccagcagatacgcctgcaggccgaggccttccaggcccgcctcaagagctggttcgagcccctggtggaagacatgcagcgccagtgggccgggctggtggagaaggtgcaggctgccgtgggcaccagcgccgcccctgtgcccagcgacaatcactgaacgccgaagcctgcagccatgcgaccccacgccaccccgtgcctcctgcctccgcgcagcctgcagcgggagaccctgtccccgccccagccgtcctcctggggtggaccctagtttaataaagattcaccaagtttcacgca

SEQ ID NO: 503 - DNA, 1144 bp, Homo sapiens
  source 1..1144: mol_type = genomic DNA
agagacgacccgacccgctagaagactggccaatcacaggcaggaagatgaaggttctgtgggctgcgttgctggtcacattcctggcaggatgccaggccaaggtggagcaagcggtggagacagagccggagcccgagctgcgccagcagaccgagtggcagagcggccagcgctgggaactggcactgggtcgcttttgggattacctgcgctgggtgcagacactgtctgagcaggtgcaggaggagctgctcagctcccaggtcacccaggaactgagggcgctgatggacgagaccatgaaggagttgaaggcctacaaatcggaactggaggaacaactgaccccggtggcggaggagacgcgggcacggctgtccaaggagctgcaggcggcgcaggcccggctgggcgcggacatggaggacgtgtgcggccgcctggtgcagtaccgcggcgaggtgcaggccatgctcggccagagcaccgaggagctgcgggtgcgcctcgcctcccacctgcgcaagctgcgtaagcggctcctccgcgatgccgatgacctgcagaagcgcctggcagtgtaccaggccggggcccgcgagggcgccgagcgcggcctcagcgccatccgcgagcgcctggggcccctggtggaacagggccgcgtgcgggccgccactgtgggctccctggccggccagccgctacaggagcgggcccaggcctggggcgagcggctgcgcgcgcggatggaggagatgggcagccggacccgcgaccgcctggacgaggtgaaggagcaggtggcggaggtgcgcgccaagctggaggagcaggcccagcagatacgcctgcaggccgaggccttccaggcccgcctcaagagctggttcgagcccctggtggaagacatgcagcgccagtgggccgggctggtggagaaggtgcaggctgccgtgggcaccagcgccgcccctgtgcccagcgacaatcactgaacgccgaagcctgcagccatgcgaccccacgccaccccgtgcctcctgcctccgcgcagcctgcagcgggagaccctgtccccgccccagccgtcctcctggggtggaccctagtttaataaagattcaccaagtttcacgca

SEQ ID NO: 504 - DNA, 1244 bp, Homo sapiens
  source 1..1244: mol_type = genomic DNA
ggatggggagataagagaagaccaggagggagttaaatagggaatgggttgggggcggcttggtaaatgtgctgggattaggctgttgcagataatgcaacaaggcttggaaggctaacctgggactggccaatcacaggcaggaagatgaaggttctgtgggctgcgttgctggtcacattcctggcaggatgccaggccaaggtggagcaagcggtggagacagagccggagcccgagctgcgccagcagaccgagtggcagagcggccagcgctgggaactggcactgggtcgcttttgggattacctgcgctgggtgcagacactgtctgagcaggtgcaggaggagctgctcagctcccaggtcacccaggaactgagggcgctgatggacgagaccatgaaggagttgaaggcctacaaatcggaactggaggaacaactgaccccggtggcggaggagacgcgggcacggctgtccaaggagctgcaggcggcgcaggcccggctgggcgcggacatggaggacgtgtgcggccgcctggtgcagtaccgcggcgaggtgcaggccatgctcggccagagcaccgaggagctgcgggtgcgcctcgcctcccacctgcgcaagctgcgtaagcggctcctccgcgatgccgatgacctgcagaagcgcctggcagtgtaccaggccggggcccgcgagggcgccgagcgcggcctcagcgccatccgcgagcgcctggggcccctggtggaacagggccgcgtgcgggccgccactgtgggctccctggccggccagccgctacaggagcgggcccaggcctggggcgagcggctgcgcgcgcggatggaggagatgggcagccggacccgcgaccgcctggacgaggtgaaggagcaggtggcggaggtgcgcgccaagctggaggagcaggcccagcagatacgcctgcaggccgaggccttccaggcccgcctcaagagctggttcgagcccctggtggaagacatgcagcgccagtgggccgggctggtggagaaggtgcaggctgccgtgggcaccagcgccgcccctgtgcccagcgacaatcactgaacgccgaagcctgcagccatgcgaccccacgccaccccgtgcctcctgcctccgcgcagcctgcagcgggagaccctgtccccgccccagccgtcctcctggggtggaccctagtttaataaagattcaccaagtttcacgca

SEQ ID NO: 505 - DNA, 1181 bp, Homo sapiens
  source 1..1181: mol_type = genomic DNA
ctactcagccccagcggaggtgaaggacgtccttccccaggagccgtttctccttccccagactggccaatcacaggcaggaagatgaaggttctgtgggctgcgttgctggtcacattcctggcaggatgccaggccaaggtggagcaagcggtggagacagagccggagcccgagctgcgccagcagaccgagtggcagagcggccagcgctgggaactggcactgggtcgcttttgggattacctgcgctgggtgcagacactgtctgagcaggtgcaggaggagctgctcagctcccaggtcacccaggaactgagggcgctgatggacgagaccatgaaggagttgaaggcctacaaatcggaactggaggaacaactgaccccggtggcggaggagacgcgggcacggctgtccaaggagctgcaggcggcgcaggcccggctgggcgcggacatggaggacgtgtgcggccgcctggtgcagtaccgcggcgaggtgcaggccatgctcggccagagcaccgaggagctgcgggtgcgcctcgcctcccacctgcgcaagctgcgtaagcggctcctccgcgatgccgatgacctgcagaagcgcctggcagtgtaccaggccggggcccgcgagggcgccgagcgcggcctcagcgccatccgcgagcgcctggggcccctggtggaacagggccgcgtgcgggccgccactgtgggctccctggccggccagccgctacaggagcgggcccaggcctggggcgagcggctgcgcgcgcggatggaggagatgggcagccggacccgcgaccgcctggacgaggtgaaggagcaggtggcggaggtgcgcgccaagctggaggagcaggcccagcagatacgcctgcaggccgaggccttccaggcccgcctcaagagctggttcgagcccctggtggaagacatgcagcgccagtgggccgggctggtggagaaggtgcaggctgccgtgggcaccagcgccgcccctgtgcccagcgacaatcactgaacgccgaagcctgcagccatgcgaccccacgccaccccgtgcctcctgcctccgcgcagcctgcagcgggagaccctgtccccgccccagccgtcctcctggggtggaccctagtttaataaagattcaccaagtttcacgca

SEQ ID NO: 506 - DNA, 5320 bp, Homo sapiens
  source 1..5320: mol_type = genomic DNA
gcagtcaccgccacccaccagctccggcaccaacagcagcgccgctgccaccgcccaccttctgccgccgccaccacagccaccttctcctcctccgctgtcctctcccgtcctcgcctctgtcgactatcaggtgaactttgaaccaggatggctgagccccgccaggagttcgaagtgatggaagatcacgctgggacgtacgggttgggggacaggaaagatcaggggggctacaccatgcaccaagaccaagagggtgacacggacgctggcctgaaagaatctcccctgcagacccccactgaggacggatctgaggaaccgggctctgaaacctctgatgctaagagcactccaacagcggaagctgaagaagcaggcattggagacacccccagcctggaagacgaagctgctggtcacgtgacccaagctcgcatggtcagtaaaagcaaagacgggactggaagcgatgacaaaaaagccaagggggctgatggtaaaacgaagatcgccacaccgcggggagcagcccctccaggccagaagggccaggccaacgccaccaggattccagcaaaaacccccccaagaaggtggcagtggtccgtactccacccaagtcgccgtcttccgccaagagccgcctgcagacagcccccgtgcccatgccagacctgaagaatgtcaagtccaagatcggctccactgagaacctgaagcaccagccgggaggcgggaaggtgcaaatagtctacaaaccagttgacctgagcaaggtgacctccaagtgtggctcattaggcaacatccatcataaaccaggaggtggccaggtggaagtaaaatctgagaagcttgacttcaaggacagagtccagtcgaagattgggtccctggacaatatcacccacgtccctggcggaggaaataaaaagattgaaacccacaagctgaccttccgcgagaacgccaaagccaagacagaccacggggcggagatcgtgtacaagtcgccagtggtgtctggggacacgtctccacggcatctcagcaatgtctcctccaccggcagcatcgacatggtagactcgccccagctcgccacgctagctgacgaggtgtctgcctccctggccaagcagggtttgtgatcaggcccctggggcggtcaataattgtggagaggagagaatgagagagtgtggaaaaaaaaagaataatgacccggcccccgccctctgcccccagctgctcctcgcagttcggttaattggttaatcacttaacctgcttttgtcactcggctttggctcgggacttcaaaatcagtgatgggagtaagagcaaatttcatctttccaaattgatgggtgggctagtaataaaatatttaaaaaaaaacattcaaaaacatggccacatccaacatttcctcaggcaattccttttgattcttttttcttccccctccatgtagaagagggagaaggagaggctctgaaagctgcttctgggggatttcaagggactgggggtgccaaccacctctggccctgttgtgggggtgtcacagaggcagtggcagcaacaaaggatttgaaacttggtgtgttcgtggagccacaggcagacgatgtcaaccttgtgtgagtgtgacgggggttggggtggggcgggaggccacgggggaggccgaggcaggggctgggcagaggggagaggaagcacaagaagtgggagtgggagaggaagccacgtgctggagagtagacatccccctccttgccgctgggagagccaaggcctatgccacctgcagcgtctgagcggccgcctgtccttggtggccgggggtgggggcctgctgtgggtcagtgtgccaccctctgcagggcagcctgtgggagaagggacagcgggtaaaaagagaaggcaagctggcaggagggtggcacttcgtggatgacctccttagaaaagactgaccttgatgtcttgagagcgctggcctcttcctccctccctgcagggtagggggcctgagttgaggggcttccctctgctccacagaaaccctgttttattgagttctgaaggttggaactgctgccatgattttggccactttgcagacctgggactttagggctaaccagttctctttgtaaggacttgtgcctcttgggagacgtccacccgtttccaagcctgggccactggcatctctggagtgtgtgggggtctgggaggcaggtcccgagccccctgtccttcccacggccactgcagtcaccccgtctgcgccgctgtgctgttgtctgccgtgagagcccaatcactgcctatacccctcatcacacgtcacaatgtcccgaattcccagcctcaccaccccttctcagtaatgaccctggttggttgcaggaggtacctactccatactgagggtgaaattaagggaaggcaaagtccaggcacaagagtgggaccccagcctctcactctcagttccactcatccaactgggaccctcaccacgaatctcatgatctgattcggttccctgtctcctcctcccgtcacagatgtgagccagggcactgctcagctgtgaccctaggtgtttctgccttgttgacatggagagagccctttcccctgagaaggcctggccccttcctgtgctgagcccacagcagcaggctgggtgtcttggttgtcagtggtggcaccaggatggaagggcaaggcacccagggcaggcccacagtcccgctgtcccccacttgcaccctagcttgtagctgccaacctcccagacagcccagcccgctgctcagctccacatgcatagtatcagccctccacacccgacaaaggggaacacacccccttggaaatggttcttttcccccagtcccagctggaagccatgctgtctgttctgctggagcagctgaacatatacatagatgttgccctgccctccccatctgcaccctgttgagttgtagttggatttgtctgtttatgcttggattcaccagagtgactatgatagtgaaaagaaaaaaaaaaaaaaaaaaggacgcatgtatcttgaaatgcttgtaaagaggtttctaacccaccctcacgaggtgtctctcacccccacactgggactcgtgtggcctgtgtggtgccaccctgctggggcctcccaagttttgaaaggctttcctcagcacctgggacccaacagagaccagcttctagcagctaaggaggccgttcagctgtgacgaaggcctgaagcacaggattaggactgaagcgatgatgtccccttccctacttccccttggggctccctgtgtcagggcacagactaggtcttgtggctggtctggcttgcggcgcgaggatggttctctctggtcatagcccgaagtctcatggcagtcccaaaggaggcttacaactcctgcatcacaagaaaaaggaagccactgccagctggggggatctgcagctcccagaagctccgtgagcctcagccacccctcagactgggttcctctccaagctcgccctctggaggggcagcgcagcctcccaccaagggccctgcgaccacagcagggattgggatgaattgcctgtcctggatctgctctagaggcccaagctgcctgcctgaggaaggatgacttgacaagtcaggagacactgttcccaaagccttgaccagagcacctcagcccgctgaccttgcacaaactccatctgctgccatgagaaaagggaagccgcctttgcaaaacattgctgcctaaagaaactcagcagcctcaggcccaattctgccacttctggtttgggtacagttaaaggcaaccctgagggacttggcagtagaaatccagggcctcccctggggctggcagcttcgtgtgcagctagagctttacctgaaaggaagtctctgggcccagaactctccaccaagagcctccctgccgttcgctgagtcccagcaattctcctaagttgaagggatctgagaaggagaaggaaatgtggggtagatttggtggtggttagagatatgcccccctcattactgccaacagtttcggctgcatttcttcacgcacctcggttcctcttcctgaagttcttgtgccctgctcttcagcaccatgggccttcttatacggaaggctctgggatctcccccttgtggggcaggctcttggggccagcctaagatcatggtttagggtgatcagtgctggcagataaattgaaaaggcacgctggcttgtgatcttaaatgaggacaatccccccagggctgggcactcctcccctcccctcacttctcccacctgcagagccagtgtccttgggtgggctagataggatatactgtatgccggctccttcaagctgctgactcactttatcaatagttccatttaaattgacttcagtggtgagactgtatcctgtttgctattgcttgttgtgctatggggggaggggggaggaatgtgtaagatagttaacatgggcaaagggagatcttggggtgcagcacttaaactgcctcgtaacccttttcatgatttcaaccacatttgctagagggagggagcagccacggagttagaggcccttggggtttctcttttccactgacaggctttcccaggcagctggctagttcattccctccccagccaggtgcaggcgtaggaatatggacatctggttgctttggcctgctgccctctttcaggggtcctaagcccacaatcatgcctccctaagaccttggcatccttccctctaagccgttggcacctctgtgccacctctcacactggctccagacacacagcctgtgcttttggagctgagatcactcgcttcaccctcctcatctttgttctccaagtaaagccacgaggtcggggcgagggcagaggtgatcacctgcgtgtcccatctacagacctgcagcttcataaaacttctgatttctcttcagctttgaaaagggttaccctgggcactggcctagagcctcacctcctaatagacttagccccatgagtttgccatgttgagcaggactatttctggcacttgcaagtcccatgatttcttcggtaattctgagggtggggggagggacatgaaatcatcttagcttagctttctgtctgtgaatgtctatatagtgtattgtgtgttttaacaaatgatttacactgactgttgctgtaaaagtgaatttggaaataaagttattactctgattaaa

SEQ ID NO: 507 - DNA, 5525 bp, Homo sapiens
  source 1..5525: mol_type = genomic DNA
gcagtcaccgccacccaccagctccggcaccaacagcagcgccgctgccaccgcccaccttctgccgccgccaccacagccaccttctcctcctccgctgtcctctcccgtcctcgcctctgtcgactatcagacaggctctgctgatgctgtccctctcctgttcagtcgtgccctcaccgttaaagagaaagagcaaactgctgggcagcagcattgatttttttaatgaagtggaaagagagctgggaataacaagtcgggcccacctcacctgcctcacctggtgaactttgaaccaggatggctgagccccgccaggagttcgaagtgatggaagatcacgctgggacgtacgggttgggggacaggaaagatcaggggggctacaccatgcaccaagaccaagagggtgacacggacgctggcctgaaagctgaagaagcaggcattggagacacccccagcctggaagacgaagctgctggtcacgtgacccaagctcgcatggtcagtaaaagcaaagacgggactggaagcgatgacaaaaaagccaagggggctgatggtaaaacgaagatcgccacaccgcggggagcagcccctccaggccagaagggccaggccaacgccaccaggattccagcaaaaaccccgcccgctccaaagacaccacccagctctggtgaacctccaaaatcaggggatcgcagcggctacagcagccccggctccccaggcactcccggcagccgctcccgcaccccgtcccttccaaccccacccacccgggagcccaagaaggtggcagtggtccgtactccacccaagtcgccgtcttccgccaagagccgcctgcagacagcccccgtgcccatgccagacctgaagaatgtcaagtccaagatcggctccactgagaacctgaagcaccagccgggaggcgggaaggtgcaaatagtctacaaaccagttgacctgagcaaggtgacctccaagtgtggctcattaggcaacatccatcataaaccaggaggtggccaggtggaagtaaaatctgagaagcttgacttcaaggacagagtccagtcgaagattgggtccctggacaatatcacccacgtccctggcggaggaaataaaaagattgaaacccacaagctgaccttccgcgagaacgccaaagccaagacagaccacggggcggagatcgtgtacaagtcgccagtggtgtctggggacacgtctccacggcatctcagcaatgtctcctccaccggcagcatcgacatggtagactcgccccagctcgccacgctagctgacgaggtgtctgcctccctggccaagcagggtttgtgatcaggcccctggggcggtcaataattgtggagaggagagaatgagagagtgtggaaaaaaaaagaataatgacccggcccccgccctctgcccccagctgctcctcgcagttcggttaattggttaatcacttaacctgcttttgtcactcggctttggctcgggacttcaaaatcagtgatgggagtaagagcaaatttcatctttccaaattgatgggtgggctagtaataaaatatttaaaaaaaaacattcaaaaacatggccacatccaacatttcctcaggcaattccttttgattcttttttcttccccctccatgtagaagagggagaaggagaggctctgaaagctgcttctgggggatttcaagggactgggggtgccaaccacctctggccctgttgtgggggtgtcacagaggcagtggcagcaacaaaggatttgaaacttggtgtgttcgtggagccacaggcagacgatgtcaaccttgtgtgagtgtgacgggggttggggtggggcgggaggccacgggggaggccgaggcaggggctgggcagaggggagaggaagcacaagaagtgggagtgggagaggaagccacgtgctggagagtagacatccccctccttgccgctgggagagccaaggcctatgccacctgcagcgtctgagcggccgcctgtccttggtggccgggggtgggggcctgctgtgggtcagtgtgccaccctctgcagggcagcctgtgggagaagggacagcgggtaaaaagagaaggcaagctggcaggagggtggcacttcgtggatgacctccttagaaaagactgaccttgatgtcttgagagcgctggcctcttcctccctccctgcagggtagggggcctgagttgaggggcttccctctgctccacagaaaccctgttttattgagttctgaaggttggaactgctgccatgattttggccactttgcagacctgggactttagggctaaccagttctctttgtaaggacttgtgcctcttgggagacgtccacccgtttccaagcctgggccactggcatctctggagtgtgtgggggtctgggaggcaggtcccgagccccctgtccttcccacggccactgcagtcaccccgtctgcgccgctgtgctgttgtctgccgtgagagcccaatcactgcctatacccctcatcacacgtcacaatgtcccgaattcccagcctcaccaccccttctcagtaatgaccctggttggttgcaggaggtacctactccatactgagggtgaaattaagggaaggcaaagtccaggcacaagagtgggaccccagcctctcactctcagttccactcatccaactgggaccctcaccacgaatctcatgatctgattcggttccctgtctcctcctcccgtcacagatgtgagccagggcactgctcagctgtgaccctaggtgtttctgccttgttgacatggagagagccctttcccctgagaaggcctggccccttcctgtgctgagcccacagcagcaggctgggtgtcttggttgtcagtggtggcaccaggatggaagggcaaggcacccagggcaggcccacagtcccgctgtcccccacttgcaccctagcttgtagctgccaacctcccagacagcccagcccgctgctcagctccacatgcatagtatcagccctccacacccgacaaaggggaacacacccccttggaaatggttcttttcccccagtcccagctggaagccatgctgtctgttctgctggagcagctgaacatatacatagatgttgccctgccctccccatctgcaccctgttgagttgtagttggatttgtctgtttatgcttggattcaccagagtgactatgatagtgaaaagaaaaaaaaaaaaaaaaaaggacgcatgtatcttgaaatgcttgtaaagaggtttctaacccaccctcacgaggtgtctctcacccccacactgggactcgtgtggcctgtgtggtgccaccctgctggggcctcccaagttttgaaaggctttcctcagcacctgggacccaacagagaccagcttctagcagctaaggaggccgttcagctgtgacgaaggcctgaagcacaggattaggactgaagcgatgatgtccccttccctacttccccttggggctccctgtgtcagggcacagactaggtcttgtggctggtctggcttgcggcgcgaggatggttctctctggtcatagcccgaagtctcatggcagtcccaaaggaggcttacaactcctgcatcacaagaaaaaggaagccactgccagctggggggatctgcagctcccagaagctccgtgagcctcagccacccctcagactgggttcctctccaagctcgccctctggaggggcagcgcagcctcccaccaagggccctgcgaccacagcagggattgggatgaattgcctgtcctggatctgctctagaggcccaagctgcctgcctgaggaaggatgacttgacaagtcaggagacactgttcccaaagccttgaccagagcacctcagcccgctgaccttgcacaaactccatctgctgccatgagaaaagggaagccgcctttgcaaaacattgctgcctaaagaaactcagcagcctcaggcccaattctgccacttctggtttgggtacagttaaaggcaaccctgagggacttggcagtagaaatccagggcctcccctggggctggcagcttcgtgtgcagctagagctttacctgaaaggaagtctctgggcccagaactctccaccaagagcctccctgccgttcgctgagtcccagcaattctcctaagttgaagggatctgagaaggagaaggaaatgtggggtagatttggtggtggttagagatatgcccccctcattactgccaacagtttcggctgcatttcttcacgcacctcggttcctcttcctgaagttcttgtgccctgctcttcagcaccatgggccttcttatacggaaggctctgggatctcccccttgtggggcaggctcttggggccagcctaagatcatggtttagggtgatcagtgctggcagataaattgaaaaggcacgctggcttgtgatcttaaatgaggacaatccccccagggctgggcactcctcccctcccctcacttctcccacctgcagagccagtgtccttgggtgggctagataggatatactgtatgccggctccttcaagctgctgactcactttatcaatagttccatttaaattgacttcagtggtgagactgtatcctgtttgctattgcttgttgtgctatggggggaggggggaggaatgtgtaagatagttaacatgggcaaagggagatcttggggtgcagcacttaaactgcctcgtaacccttttcatgatttcaaccacatttgctagagggagggagcagccacggagttagaggcccttggggtttctcttttccactgacaggctttcccaggcagctggctagttcattccctccccagccaggtgcaggcgtaggaatatggacatctggttgctttggcctgctgccctctttcaggggtcctaagcccacaatcatgcctccctaagaccttggcatccttccctctaagccgttggcacctctgtgccacctctcacactggctccagacacacagcctgtgcttttggagctgagatcactcgcttcaccctcctcatctttgttctccaagtaaagccacgaggtcggggcgagggcagaggtgatcacctgcgtgtcccatctacagacctgcagcttcataaaacttctgatttctcttcagctttgaaaagggttaccctgggcactggcctagagcctcacctcctaatagacttagccccatgagtttgccatgttgagcaggactatttctggcacttgcaagtcccatgatttcttcggtaattctgagggtggggggagggacatgaaatcatcttagcttagctttctgtctgtgaatgtctatatagtgtattgtgtgttttaacaaatgatttacactgactgttgctgtaaaagtgaatttggaaataaagttattactctgattaaa

SEQ ID NO: 508 - DNA, 6902 bp, Homo sapiens
  source 1..6902: mol_type = genomic DNA
gcagtcaccgccacccaccagctccggcaccaacagcagcgccgctgccaccgcccaccttctgccgccgccaccacagccaccttctcctcctccgctgtcctctcccgtcctcgcctctgtcgactatcaggtgaactttgaaccaggatggctgagccccgccaggagttcgaagtgatggaagatcacgctgggacgtacgggttgggggacaggaaagatcaggggggctacaccatgcaccaagaccaagagggtgacacggacgctggcctgaaagaatctcccctgcagacccccactgaggacggatctgaggaaccgggctctgaaacctctgatgctaagagcactccaacagcggaagatgtgacagcacccttagtggatgagggagctcccggcaagcaggctgccgcgcagccccacacggagatcccagaaggaaccacagctgaagaagcaggcattggagacacccccagcctggaagacgaagctgctggtcacgtgacccaagaggagttgagagttccgggccggcagaggaaggcgcctgaaaggcccctggccaatgagattagcgcccacgtccagcctggaccctgcggagaggcctctggggtctctgggccgtgcctcggggagaaagagccagaagctcccgtcccgctgaccgcgagccttcctcagcaccgtcccgtttgcccagcgcctcctccaacaggaggccctcaggagccctccctggagtggggacaaaaaggcggggactgggccgagaagggtccggcctttccgaagcccgccaccactgcgtatctccacacagagcctgaaagtggtaaggtggtccaggaaggcttcctccgagagccaggccccccaggtctgagccaccagctcatgtccggcatgcctggggctcccctcctgcctgagggccccagagaggccacacgccaaccttcggggacaggacctgaggacacagagggcggccgccacgcccctgagctgctcaagcaccagcttctaggagacctgcaccaggaggggccgccgctgaagggggcagggggcaaagagaggccggggagcaaggaggaggtggatgaagaccgcgacgtcgatgagtcctccccccaagactcccctccctccaaggcctccccagcccaagatgggcggcctccccagacagccgccagagaagccaccagcatcccaggcttcccagcggagggtgccatccccctccctgtggatttcctctccaaagtttccacagagatcccagcctcagagcccgacgggcccagtgtagggcgggccaaagggcaggatgcccccctggagttcacgtttcacgtggaaatcacacccaacgtgcagaaggagcaggcgcactcggaggagcatttgggaagggctgcatttccaggggcccctggagaggggccagaggcccggggcccctctttgggagaggacacaaaagaggctgaccttccagagccctctgaaaagcagcctgctgctgctccgcgggggaagcccgtcagccgggtccctcaactcaaagctcgcatggtcagtaaaagcaaagacgggactggaagcgatgacaaaaaagccaagacatccacacgttcctctgctaaaaccttgaaaaataggccttgccttagccccaaacaccccactcctggtagctcagaccctctgatccaaccctccagccctgctgtgtgcccagagccaccttcctctcctaaatacgtctcttctgtcacttcccgaactggcagttctggagcaaaggagatgaaactcaagggggctgatggtaaaacgaagatcgccacaccgcggggagcagcccctccaggccagaagggccaggccaacgccaccaggattccagcaaaaaccccgcccgctccaaagacaccacccagctctggtgaacctccaaaatcaggggatcgcagcggctacagcagccccggctccccaggcactcccggcagccgctcccgcaccccgtcccttccaaccccacccacccgggagcccaagaaggtggcagtggtccgtactccacccaagtcgccgtcttccgccaagagccgcctgcagacagcccccgtgcccatgccagacctgaagaatgtcaagtccaagatcggctccactgagaacctgaagcaccagccgggaggcgggaaggtgcagataattaataagaagctggatcttagcaacgtccagtccaagtgtggctcaaaggataatatcaaacacgtcccgggaggcggcagtgtgcaaatagtctacaaaccagttgacctgagcaaggtgacctccaagtgtggctcattaggcaacatccatcataaaccaggaggtggccaggtggaagtaaaatctgagaagcttgacttcaaggacagagtccagtcgaagattgggtccctggacaatatcacccacgtccctggcggaggaaataaaaagattgaaacccacaagctgaccttccgcgagaacgccaaagccaagacagaccacggggcggagatcgtgtacaagtcgccagtggtgtctggggacacgtctccacggcatctcagcaatgtctcctccaccggcagcatcgacatggtagactcgccccagctcgccacgctagctgacgaggtgtctgcctccctggccaagcagggtttgtgatcaggcccctggggcggtcaataattgtggagaggagagaatgagagagtgtggaaaaaaaaagaataatgacccggcccccgccctctgcccccagctgctcctcgcagttcggttaattggttaatcacttaacctgcttttgtcactcggctttggctcgggacttcaaaatcagtgatgggagtaagagcaaatttcatctttccaaattgatgggtgggctagtaataaaatatttaaaaaaaaacattcaaaaacatggccacatccaacatttcctcaggcaattccttttgattcttttttcttccccctccatgtagaagagggagaaggagaggctctgaaagctgcttctgggggatttcaagggactgggggtgccaaccacctctggccctgttgtgggggtgtcacagaggcagtggcagcaacaaaggatttgaaacttggtgtgttcgtggagccacaggcagacgatgtcaaccttgtgtgagtgtgacgggggttggggtggggcgggaggccacgggggaggccgaggcaggggctgggcagaggggagaggaagcacaagaagtgggagtgggagaggaagccacgtgctggagagtagacatccccctccttgccgctgggagagccaaggcctatgccacctgcagcgtctgagcggccgcctgtccttggtggccgggggtgggggcctgctgtgggtcagtgtgccaccctctgcagggcagcctgtgggagaagggacagcgggtaaaaagagaaggcaagctggcaggagggtggcacttcgtggatgacctccttagaaaagactgaccttgatgtcttgagagcgctggcctcttcctccctccctgcagggtagggggcctgagttgaggggcttccctctgctccacagaaaccctgttttattgagttctgaaggttggaactgctgccatgattttggccactttgcagacctgggactttagggctaaccagttctctttgtaaggacttgtgcctcttgggagacgtccacccgtttccaagcctgggccactggcatctctggagtgtgtgggggtctgggaggcaggtcccgagccccctgtccttcccacggccactgcagtcaccccgtctgcgccgctgtgctgttgtctgccgtgagagcccaatcactgcctatacccctcatcacacgtcacaatgtcccgaattcccagcctcaccaccccttctcagtaatgaccctggttggttgcaggaggtacctactccatactgagggtgaaattaagggaaggcaaagtccaggcacaagagtgggaccccagcctctcactctcagttccactcatccaactgggaccctcaccacgaatctcatgatctgattcggttccctgtctcctcctcccgtcacagatgtgagccagggcactgctcagctgtgaccctaggtgtttctgccttgttgacatggagagagccctttcccctgagaaggcctggccccttcctgtgctgagcccacagcagcaggctgggtgtcttggttgtcagtggtggcaccaggatggaagggcaaggcacccagggcaggcccacagtcccgctgtcccccacttgcaccctagcttgtagctgccaacctcccagacagcccagcccgctgctcagctccacatgcatagtatcagccctccacacccgacaaaggggaacacacccccttggaaatggttcttttcccccagtcccagctggaagccatgctgtctgttctgctggagcagctgaacatatacatagatgttgccctgccctccccatctgcaccctgttgagttgtagttggatttgtctgtttatgcttggattcaccagagtgactatgatagtgaaaagaaaaaaaaaaaaaaaaaaggacgcatgtatcttgaaatgcttgtaaagaggtttctaacccaccctcacgaggtgtctctcacccccacactgggactcgtgtggcctgtgtggtgccaccctgctggggcctcccaagttttgaaaggctttcctcagcacctgggacccaacagagaccagcttctagcagctaaggaggccgttcagctgtgacgaaggcctgaagcacaggattaggactgaagcgatgatgtccccttccctacttccccttggggctccctgtgtcagggcacagactaggtcttgtggctggtctggcttgcggcgcgaggatggttctctctggtcatagcccgaagtctcatggcagtcccaaaggaggcttacaactcctgcatcacaagaaaaaggaagccactgccagctggggggatctgcagctcccagaagctccgtgagcctcagccacccctcagactgggttcctctccaagctcgccctctggaggggcagcgcagcctcccaccaagggccctgcgaccacagcagggattgggatgaattgcctgtcctggatctgctctagaggcccaagctgcctgcctgaggaaggatgacttgacaagtcaggagacactgttcccaaagccttgaccagagcacctcagcccgctgaccttgcacaaactccatctgctgccatgagaaaagggaagccgcctttgcaaaacattgctgcctaaagaaactcagcagcctcaggcccaattctgccacttctggtttgggtacagttaaaggcaaccctgagggacttggcagtagaaatccagggcctcccctggggctggcagcttcgtgtgcagctagagctttacctgaaaggaagtctctgggcccagaactctccaccaagagcctccctgccgttcgctgagtcccagcaattctcctaagttgaagggatctgagaaggagaaggaaatgtggggtagatttggtggtggttagagatatgcccccctcattactgccaacagtttcggctgcatttcttcacgcacctcggttcctcttcctgaagttcttgtgccctgctcttcagcaccatgggccttcttatacggaaggctctgggatctcccccttgtggggcaggctcttggggccagcctaagatcatggtttagggtgatcagtgctggcagataaattgaaaaggcacgctggcttgtgatcttaaatgaggacaatccccccagggctgggcactcctcccctcccctcacttctcccacctgcagagccagtgtccttgggtgggctagataggatatactgtatgccggctccttcaagctgctgactcactttatcaatagttccatttaaattgacttcagtggtgagactgtatcctgtttgctattgcttgttgtgctatggggggaggggggaggaatgtgtaagatagttaacatgggcaaagggagatcttggggtgcagcacttaaactgcctcgtaacccttttcatgatttcaaccacatttgctagagggagggagcagccacggagttagaggcccttggggtttctcttttccactgacaggctttcccaggcagctggctagttcattccctccccagccaggtgcaggcgtaggaatatggacatctggttgctttggcctgctgccctctttcaggggtcctaagcccacaatcatgcctccctaagaccttggcatccttccctctaagccgttggcacctctgtgccacctctcacactggctccagacacacagcctgtgcttttggagctgagatcactcgcttcaccctcctcatctttgttctccaagtaaagccacgaggtcggggcgagggcagaggtgatcacctgcgtgtcccatctacagacctgcagcttcataaaacttctgatttctcttcagctttgaaaagggttaccctgggcactggcctagagcctcacctcctaatagacttagccccatgagtttgccatgttgagcaggactatttctggcacttgcaagtcccatgatttcttcggtaattctgagggtggggggagggacatgaaatcatcttagcttagctttctgtctgtgaatgtctatatagtgtattgtgtgttttaacaaatgatttacactgactgttgctgtaaaagtgaatttggaaataaagttattactctgattaaa

SEQ ID NO: 509 - DNA, 6809 bp, Homo sapiens
  source 1..6809: mol_type = genomic DNA
gcagtcaccgccacccaccagctccggcaccaacagcagcgccgctgccaccgcccaccttctgccgccgccaccacagccaccttctcctcctccgctgtcctctcccgtcctcgcctctgtcgactatcaggtgaactttgaaccaggatggctgagccccgccaggagttcgaagtgatggaagatcacgctgggacgtacgggttgggggacaggaaagatcaggggggctacaccatgcaccaagaccaagagggtgacacggacgctggcctgaaagaatctcccctgcagacccccactgaggacggatctgaggaaccgggctctgaaacctctgatgctaagagcactccaacagcggaagatgtgacagcacccttagtggatgagggagctcccggcaagcaggctgccgcgcagccccacacggagatcccagaaggaaccacagctgaagaagcaggcattggagacacccccagcctggaagacgaagctgctggtcacgtgacccaagaggagttgagagttccgggccggcagaggaaggcgcctgaaaggcccctggccaatgagattagcgcccacgtccagcctggaccctgcggagaggcctctggggtctctgggccgtgcctcggggagaaagagccagaagctcccgtcccgctgaccgcgagccttcctcagcaccgtcccgtttgcccagcgcctcctccaacaggaggccctcaggagccctccctggagtggggacaaaaaggcggggactgggccgagaagggtccggcctttccgaagcccgccaccactgcgtatctccacacagagcctgaaagtggtaaggtggtccaggaaggcttcctccgagagccaggccccccaggtctgagccaccagctcatgtccggcatgcctggggctcccctcctgcctgagggccccagagaggccacacgccaaccttcggggacaggacctgaggacacagagggcggccgccacgcccctgagctgctcaagcaccagcttctaggagacctgcaccaggaggggccgccgctgaagggggcagggggcaaagagaggccggggagcaaggaggaggtggatgaagaccgcgacgtcgatgagtcctccccccaagactcccctccctccaaggcctccccagcccaagatgggcggcctccccagacagccgccagagaagccaccagcatcccaggcttcccagcggagggtgccatccccctccctgtggatttcctctccaaagtttccacagagatcccagcctcagagcccgacgggcccagtgtagggcgggccaaagggcaggatgcccccctggagttcacgtttcacgtggaaatcacacccaacgtgcagaaggagcaggcgcactcggaggagcatttgggaagggctgcatttccaggggcccctggagaggggccagaggcccggggcccctctttgggagaggacacaaaagaggctgaccttccagagccctctgaaaagcagcctgctgctgctccgcgggggaagcccgtcagccgggtccctcaactcaaagctcgcatggtcagtaaaagcaaagacgggactggaagcgatgacaaaaaagccaagacatccacacgttcctctgctaaaaccttgaaaaataggccttgccttagccccaaacaccccactcctggtagctcagaccctctgatccaaccctccagccctgctgtgtgcccagagccaccttcctctcctaaatacgtctcttctgtcacttcccgaactggcagttctggagcaaaggagatgaaactcaagggggctgatggtaaaacgaagatcgccacaccgcggggagcagcccctccaggccagaagggccaggccaacgccaccaggattccagcaaaaaccccgcccgctccaaagacaccacccagctctggtgaacctccaaaatcaggggatcgcagcggctacagcagccccggctccccaggcactcccggcagccgctcccgcaccccgtcccttccaaccccacccacccgggagcccaagaaggtggcagtggtccgtactccacccaagtcgccgtcttccgccaagagccgcctgcagacagcccccgtgcccatgccagacctgaagaatgtcaagtccaagatcggctccactgagaacctgaagcaccagccgggaggcgggaaggtgcaaatagtctacaaaccagttgacctgagcaaggtgacctccaagtgtggctcattaggcaacatccatcataaaccaggaggtggccaggtggaagtaaaatctgagaagcttgacttcaaggacagagtccagtcgaagattgggtccctggacaatatcacccacgtccctggcggaggaaataaaaagattgaaacccacaagctgaccttccgcgagaacgccaaagccaagacagaccacggggcggagatcgtgtacaagtcgccagtggtgtctggggacacgtctccacggcatctcagcaatgtctcctccaccggcagcatcgacatggtagactcgccccagctcgccacgctagctgacgaggtgtctgcctccctggccaagcagggtttgtgatcaggcccctggggcggtcaataattgtggagaggagagaatgagagagtgtggaaaaaaaaagaataatgacccggcccccgccctctgcccccagctgctcctcgcagttcggttaattggttaatcacttaacctgcttttgtcactcggctttggctcgggacttcaaaatcagtgatgggagtaagagcaaatttcatctttccaaattgatgggtgggctagtaataaaatatttaaaaaaaaacattcaaaaacatggccacatccaacatttcctcaggcaattccttttgattcttttttcttccccctccatgtagaagagggagaaggagaggctctgaaagctgcttctgggggatttcaagggactgggggtgccaaccacctctggccctgttgtgggggtgtcacagaggcagtggcagcaacaaaggatttgaaacttggtgtgttcgtggagccacaggcagacgatgtcaaccttgtgtgagtgtgacgggggttggggtggggcgggaggccacgggggaggccgaggcaggggctgggcagaggggagaggaagcacaagaagtgggagtgggagaggaagccacgtgctggagagtagacatccccctccttgccgctgggagagccaaggcctatgccacctgcagcgtctgagcggccgcctgtccttggtggccgggggtgggggcctgctgtgggtcagtgtgccaccctctgcagggcagcctgtgggagaagggacagcgggtaaaaagagaaggcaagctggcaggagggtggcacttcgtggatgacctccttagaaaagactgaccttgatgtcttgagagcgctggcctcttcctccctccctgcagggtagggggcctgagttgaggggcttccctctgctccacagaaaccctgttttattgagttctgaaggttggaactgctgccatgattttggccactttgcagacctgggactttagggctaaccagttctctttgtaaggacttgtgcctcttgggagacgtccacccgtttccaagcctgggccactggcatctctggagtgtgtgggggtctgggaggcaggtcccgagccccctgtccttcccacggccactgcagtcaccccgtctgcgccgctgtgctgttgtctgccgtgagagcccaatcactgcctatacccctcatcacacgtcacaatgtcccgaattcccagcctcaccaccccttctcagtaatgaccctggttggttgcaggaggtacctactccatactgagggtgaaattaagggaaggcaaagtccaggcacaagagtgggaccccagcctctcactctcagttccactcatccaactgggaccctcaccacgaatctcatgatctgattcggttccctgtctcctcctcccgtcacagatgtgagccagggcactgctcagctgtgaccctaggtgtttctgccttgttgacatggagagagccctttcccctgagaaggcctggccccttcctgtgctgagcccacagcagcaggctgggtgtcttggttgtcagtggtggcaccaggatggaagggcaaggcacccagggcaggcccacagtcccgctgtcccccacttgcaccctagcttgtagctgccaacctcccagacagcccagcccgctgctcagctccacatgcatagtatcagccctccacacccgacaaaggggaacacacccccttggaaatggttcttttcccccagtcccagctggaagccatgctgtctgttctgctggagcagctgaacatatacatagatgttgccctgccctccccatctgcaccctgttgagttgtagttggatttgtctgtttatgcttggattcaccagagtgactatgatagtgaaaagaaaaaaaaaaaaaaaaaaggacgcatgtatcttgaaatgcttgtaaagaggtttctaacccaccctcacgaggtgtctctcacccccacactgggactcgtgtggcctgtgtggtgccaccctgctggggcctcccaagttttgaaaggctttcctcagcacctgggacccaacagagaccagcttctagcagctaaggaggccgttcagctgtgacgaaggcctgaagcacaggattaggactgaagcgatgatgtccccttccctacttccccttggggctccctgtgtcagggcacagactaggtcttgtggctggtctggcttgcggcgcgaggatggttctctctggtcatagcccgaagtctcatggcagtcccaaaggaggcttacaactcctgcatcacaagaaaaaggaagccactgccagctggggggatctgcagctcccagaagctccgtgagcctcagccacccctcagactgggttcctctccaagctcgccctctggaggggcagcgcagcctcccaccaagggccctgcgaccacagcagggattgggatgaattgcctgtcctggatctgctctagaggcccaagctgcctgcctgaggaaggatgacttgacaagtcaggagacactgttcccaaagccttgaccagagcacctcagcccgctgaccttgcacaaactccatctgctgccatgagaaaagggaagccgcctttgcaaaacattgctgcctaaagaaactcagcagcctcaggcccaattctgccacttctggtttgggtacagttaaaggcaaccctgagggacttggcagtagaaatccagggcctcccctggggctggcagcttcgtgtgcagctagagctttacctgaaaggaagtctctgggcccagaactctccaccaagagcctccctgccgttcgctgagtcccagcaattctcctaagttgaagggatctgagaaggagaaggaaatgtggggtagatttggtggtggttagagatatgcccccctcattactgccaacagtttcggctgcatttcttcacgcacctcggttcctcttcctgaagttcttgtgccctgctcttcagcaccatgggccttcttatacggaaggctctgggatctcccccttgtggggcaggctcttggggccagcctaagatcatggtttagggtgatcagtgctggcagataaattgaaaaggcacgctggcttgtgatcttaaatgaggacaatccccccagggctgggcactcctcccctcccctcacttctcccacctgcagagccagtgtccttgggtgggctagataggatatactgtatgccggctccttcaagctgctgactcactttatcaatagttccatttaaattgacttcagtggtgagactgtatcctgtttgctattgcttgttgtgctatggggggaggggggaggaatgtgtaagatagttaacatgggcaaagggagatcttggggtgcagcacttaaactgcctcgtaacccttttcatgatttcaaccacatttgctagagggagggagcagccacggagttagaggcccttggggtttctcttttccactgacaggctttcccaggcagctggctagttcattccctccccagccaggtgcaggcgtaggaatatggacatctggttgctttggcctgctgccctctttcaggggtcctaagcccacaatcatgcctccctaagaccttggcatccttccctctaagccgttggcacctctgtgccacctctcacactggctccagacacacagcctgtgcttttggagctgagatcactcgcttcaccctcctcatctttgttctccaagtaaagccacgaggtcggggcgagggcagaggtgatcacctgcgtgtcccatctacagacctgcagcttcataaaacttctgatttctcttcagctttgaaaagggttaccctgggcactggcctagagcctcacctcctaatagacttagccccatgagtttgccatgttgagcaggactatttctggcacttgcaagtcccatgatttcttcggtaattctgagggtggggggagggacatgaaatcatcttagcttagctttctgtctgtgaatgtctatatagtgtattgtgtgttttaacaaatgatttacactgactgttgctgtaaaagtgaatttggaaataaagttattactctgattaaa

SEQ ID NO: 510 - DNA, 6704 bp, Homo sapiens
  source 1..6704: mol_type = genomic DNA
gcagtcaccgccacccaccagctccggcaccaacagcagcgccgctgccaccgcccaccttctgccgccgccaccacagccaccttctcctcctccgctgtcctctcccgtcctcgcctctgtcgactatcaggtgaactttgaaccaggatggctgagccccgccaggagttcgaagtgatggaagatcacgctgggacgtacgggttgggggacaggaaagatcaggggggctacaccatgcaccaagaccaagagggtgacacggacgctggcctgaaagaatctcccctgcagacccccactgaggacggatctgaggaaccgggctctgaaacctctgatgctaagagcactccaacagcggaagatgtgacagcacccttagtggatgagggagctcccggcaagcaggctgccgcgcagccccacacggagatcccagaaggaaccacagctgaagaagcaggcattggagacacccccagcctggaagacgaagctgctggtcacgtgacccaagaggagttgagagttccgggccggcagaggaaggcgcctgaaaggcccctggccaatgagattagcgcccacgtccagcctggaccctgcggagaggcctctggggtctctgggccgtgcctcggggagaaagagccagaagctcccgtcccgctgaccgcgagccttcctcagcaccgtcccgtttgcccagcgcctcctccaacaggaggccctcaggagccctccctggagtggggacaaaaaggcggggactgggccgagaagggtccggcctttccgaagcccgccaccactgcgtatctccacacagagcctgaaagtggtaaggtggtccaggaaggcttcctccgagagccaggccccccaggtctgagccaccagctcatgtccggcatgcctggggctcccctcctgcctgagggccccagagaggccacacgccaaccttcggggacaggacctgaggacacagagggcggccgccacgcccctgagctgctcaagcaccagcttctaggagacctgcaccaggaggggccgccgctgaagggggcagggggcaaagagaggccggggagcaaggaggaggtggatgaagaccgcgacgtcgatgagtcctccccccaagactcccctccctccaaggcctccccagcccaagatgggcggcctccccagacagccgccagagaagccaccagcatcccaggcttcccagcggagggtgccatccccctccctgtggatttcctctccaaagtttccacagagatcccagcctcagagcccgacgggcccagtgtagggcgggccaaagggcaggatgcccccctggagttcacgtttcacgtggaaatcacacccaacgtgcagaaggagcaggcgcactcggaggagcatttgggaagggctgcatttccaggggcccctggagaggggccagaggcccggggcccctctttgggagaggacacaaaagaggctgaccttccagagccctctgaaaagcagcctgctgctgctccgcgggggaagcccgtcagccgggtccctcaactcaaagctcgcatggtcagtaaaagcaaagacgggactggaagcgatgacaaaaaagccaagggggctgatggtaaaacgaagatcgccacaccgcggggagcagcccctccaggccagaagggccaggccaacgccaccaggattccagcaaaaaccccgcccgctccaaagacaccacccagctctggtgaacctccaaaatcaggggatcgcagcggctacagcagccccggctccccaggcactcccggcagccgctcccgcaccccgtcccttccaaccccacccacccgggagcccaagaaggtggcagtggtccgtactccacccaagtcgccgtcttccgccaagagccgcctgcagacagcccccgtgcccatgccagacctgaagaatgtcaagtccaagatcggctccactgagaacctgaagcaccagccgggaggcgggaaggtgcagataattaataagaagctggatcttagcaacgtccagtccaagtgtggctcaaaggataatatcaaacacgtcccgggaggcggcagtgtgcaaatagtctacaaaccagttgacctgagcaaggtgacctccaagtgtggctcattaggcaacatccatcataaaccaggaggtggccaggtggaagtaaaatctgagaagcttgacttcaaggacagagtccagtcgaagattgggtccctggacaatatcacccacgtccctggcggaggaaataaaaagattgaaacccacaagctgaccttccgcgagaacgccaaagccaagacagaccacggggcggagatcgtgtacaagtcgccagtggtgtctggggacacgtctccacggcatctcagcaatgtctcctccaccggcagcatcgacatggtagactcgccccagctcgccacgctagctgacgaggtgtctgcctccctggccaagcagggtttgtgatcaggcccctggggcggtcaataattgtggagaggagagaatgagagagtgtggaaaaaaaaagaataatgacccggcccccgccctctgcccccagctgctcctcgcagttcggttaattggttaatcacttaacctgcttttgtcactcggctttggctcgggacttcaaaatcagtgatgggagtaagagcaaatttcatctttccaaattgatgggtgggctagtaataaaatatttaaaaaaaaacattcaaaaacatggccacatccaacatttcctcaggcaattccttttgattcttttttcttccccctccatgtagaagagggagaaggagaggctctgaaagctgcttctgggggatttcaagggactgggggtgccaaccacctctggccctgttgtgggggtgtcacagaggcagtggcagcaacaaaggatttgaaacttggtgtgttcgtggagccacaggcagacgatgtcaaccttgtgtgagtgtgacgggggttggggtggggcgggaggccacgggggaggccgaggcaggggctgggcagaggggagaggaagcacaagaagtgggagtgggagaggaagccacgtgctggagagtagacatccccctccttgccgctgggagagccaaggcctatgccacctgcagcgtctgagcggccgcctgtccttggtggccgggggtgggggcctgctgtgggtcagtgtgccaccctctgcagggcagcctgtgggagaagggacagcgggtaaaaagagaaggcaagctggcaggagggtggcacttcgtggatgacctccttagaaaagactgaccttgatgtcttgagagcgctggcctcttcctccctccctgcagggtagggggcctgagttgaggggcttccctctgctccacagaaaccctgttttattgagttctgaaggttggaactgctgccatgattttggccactttgcagacctgggactttagggctaaccagttctctttgtaaggacttgtgcctcttgggagacgtccacccgtttccaagcctgggccactggcatctctggagtgtgtgggggtctgggaggcaggtcccgagccccctgtccttcccacggccactgcagtcaccccgtctgcgccgctgtgctgttgtctgccgtgagagcccaatcactgcctatacccctcatcacacgtcacaatgtcccgaattcccagcctcaccaccccttctcagtaatgaccctggttggttgcaggaggtacctactccatactgagggtgaaattaagggaaggcaaagtccaggcacaagagtgggaccccagcctctcactctcagttccactcatccaactgggaccctcaccacgaatctcatgatctgattcggttccctgtctcctcctcccgtcacagatgtgagccagggcactgctcagctgtgaccctaggtgtttctgccttgttgacatggagagagccctttcccctgagaaggcctggccccttcctgtgctgagcccacagcagcaggctgggtgtcttggttgtcagtggtggcaccaggatggaagggcaaggcacccagggcaggcccacagtcccgctgtcccccacttgcaccctagcttgtagctgccaacctcccagacagcccagcccgctgctcagctccacatgcatagtatcagccctccacacccgacaaaggggaacacacccccttggaaatggttcttttcccccagtcccagctggaagccatgctgtctgttctgctggagcagctgaacatatacatagatgttgccctgccctccccatctgcaccctgttgagttgtagttggatttgtctgtttatgcttggattcaccagagtgactatgatagtgaaaagaaaaaaaaaaaaaaaaaaggacgcatgtatcttgaaatgcttgtaaagaggtttctaacccaccctcacgaggtgtctctcacccccacactgggactcgtgtggcctgtgtggtgccaccctgctggggcctcccaagttttgaaaggctttcctcagcacctgggacccaacagagaccagcttctagcagctaaggaggccgttcagctgtgacgaaggcctgaagcacaggattaggactgaagcgatgatgtccccttccctacttccccttggggctccctgtgtcagggcacagactaggtcttgtggctggtctggcttgcggcgcgaggatggttctctctggtcatagcccgaagtctcatggcagtcccaaaggaggcttacaactcctgcatcacaagaaaaaggaagccactgccagctggggggatctgcagctcccagaagctccgtgagcctcagccacccctcagactgggttcctctccaagctcgccctctggaggggcagcgcagcctcccaccaagggccctgcgaccacagcagggattgggatgaattgcctgtcctggatctgctctagaggcccaagctgcctgcctgaggaaggatgacttgacaagtcaggagacactgttcccaaagccttgaccagagcacctcagcccgctgaccttgcacaaactccatctgctgccatgagaaaagggaagccgcctttgcaaaacattgctgcctaaagaaactcagcagcctcaggcccaattctgccacttctggtttgggtacagttaaaggcaaccctgagggacttggcagtagaaatccagggcctcccctggggctggcagcttcgtgtgcagctagagctttacctgaaaggaagtctctgggcccagaactctccaccaagagcctccctgccgttcgctgagtcccagcaattctcctaagttgaagggatctgagaaggagaaggaaatgtggggtagatttggtggtggttagagatatgcccccctcattactgccaacagtttcggctgcatttcttcacgcacctcggttcctcttcctgaagttcttgtgccctgctcttcagcaccatgggccttcttatacggaaggctctgggatctcccccttgtggggcaggctcttggggccagcctaagatcatggtttagggtgatcagtgctggcagataaattgaaaaggcacgctggcttgtgatcttaaatgaggacaatccccccagggctgggcactcctcccctcccctcacttctcccacctgcagagccagtgtccttgggtgggctagataggatatactgtatgccggctccttcaagctgctgactcactttatcaatagttccatttaaattgacttcagtggtgagactgtatcctgtttgctattgcttgttgtgctatggggggaggggggaggaatgtgtaagatagttaacatgggcaaagggagatcttggggtgcagcacttaaactgcctcgtaacccttttcatgatttcaaccacatttgctagagggagggagcagccacggagttagaggcccttggggtttctcttttccactgacaggctttcccaggcagctggctagttcattccctccccagccaggtgcaggcgtaggaatatggacatctggttgctttggcctgctgccctctttcaggggtcctaagcccacaatcatgcctccctaagaccttggcatccttccctctaagccgttggcacctctgtgccacctctcacactggctccagacacacagcctgtgcttttggagctgagatcactcgcttcaccctcctcatctttgttctccaagtaaagccacgaggtcggggcgagggcagaggtgatcacctgcgtgtcccatctacagacctgcagcttcataaaacttctgatttctcttcagctttgaaaagggttaccctgggcactggcctagagcctcacctcctaatagacttagccccatgagtttgccatgttgagcaggactatttctggcacttgcaagtcccatgatttcttcggtaattctgagggtggggggagggacatgaaatcatcttagcttagctttctgtctgtgaatgtctatatagtgtattgtgtgttttaacaaatgatttacactgactgttgctgtaaaagtgaatttggaaataaagttattactctgattaaa

SEQ ID NO: 511 - DNA, 6611 bp, Homo sapiens
  source 1..6611: mol_type = genomic DNA
gcagtcaccgccacccaccagctccggcaccaacagcagcgccgctgccaccgcccaccttctgccgccgccaccacagccaccttctcctcctccgctgtcctctcccgtcctcgcctctgtcgactatcaggtgaactttgaaccaggatggctgagccccgccaggagttcgaagtgatggaagatcacgctgggacgtacgggttgggggacaggaaagatcaggggggctacaccatgcaccaagaccaagagggtgacacggacgctggcctgaaagaatctcccctgcagacccccactgaggacggatctgaggaaccgggctctgaaacctctgatgctaagagcactccaacagcggaagatgtgacagcacccttagtggatgagggagctcccggcaagcaggctgccgcgcagccccacacggagatcccagaaggaaccacagctgaagaagcaggcattggagacacccccagcctggaagacgaagctgctggtcacgtgacccaagaggagttgagagttccgggccggcagaggaaggcgcctgaaaggcccctggccaatgagattagcgcccacgtccagcctggaccctgcggagaggcctctggggtctctgggccgtgcctcggggagaaagagccagaagctcccgtcccgctgaccgcgagccttcctcagcaccgtcccgtttgcccagcgcctcctccaacaggaggccctcaggagccctccctggagtggggacaaaaaggcggggactgggccgagaagggtccggcctttccgaagcccgccaccactgcgtatctccacacagagcctgaaagtggtaaggtggtccaggaaggcttcctccgagagccaggccccccaggtctgagccaccagctcatgtccggcatgcctggggctcccctcctgcctgagggccccagagaggccacacgccaaccttcggggacaggacctgaggacacagagggcggccgccacgcccctgagctgctcaagcaccagcttctaggagacctgcaccaggaggggccgccgctgaagggggcagggggcaaagagaggccggggagcaaggaggaggtggatgaagaccgcgacgtcgatgagtcctccccccaagactcccctccctccaaggcctccccagcccaagatgggcggcctccccagacagccgccagagaagccaccagcatcccaggcttcccagcggagggtgccatccccctccctgtggatttcctctccaaagtttccacagagatcccagcctcagagcccgacgggcccagtgtagggcgggccaaagggcaggatgcccccctggagttcacgtttcacgtggaaatcacacccaacgtgcagaaggagcaggcgcactcggaggagcatttgggaagggctgcatttccaggggcccctggagaggggccagaggcccggggcccctctttgggagaggacacaaaagaggctgaccttccagagccctctgaaaagcagcctgctgctgctccgcgggggaagcccgtcagccgggtccctcaactcaaagctcgcatggtcagtaaaagcaaagacgggactggaagcgatgacaaaaaagccaagggggctgatggtaaaacgaagatcgccacaccgcggggagcagcccctccaggccagaagggccaggccaacgccaccaggattccagcaaaaaccccgcccgctccaaagacaccacccagctctggtgaacctccaaaatcaggggatcgcagcggctacagcagccccggctccccaggcactcccggcagccgctcccgcaccccgtcccttccaaccccacccacccgggagcccaagaaggtggcagtggtccgtactccacccaagtcgccgtcttccgccaagagccgcctgcagacagcccccgtgcccatgccagacctgaagaatgtcaagtccaagatcggctccactgagaacctgaagcaccagccgggaggcgggaaggtgcaaatagtctacaaaccagttgacctgagcaaggtgacctccaagtgtggctcattaggcaacatccatcataaaccaggaggtggccaggtggaagtaaaatctgagaagcttgacttcaaggacagagtccagtcgaagattgggtccctggacaatatcacccacgtccctggcggaggaaataaaaagattgaaacccacaagctgaccttccgcgagaacgccaaagccaagacagaccacggggcggagatcgtgtacaagtcgccagtggtgtctggggacacgtctccacggcatctcagcaatgtctcctccaccggcagcatcgacatggtagactcgccccagctcgccacgctagctgacgaggtgtctgcctccctggccaagcagggtttgtgatcaggcccctggggcggtcaataattgtggagaggagagaatgagagagtgtggaaaaaaaaagaataatgacccggcccccgccctctgcccccagctgctcctcgcagttcggttaattggttaatcacttaacctgcttttgtcactcggctttggctcgggacttcaaaatcagtgatgggagtaagagcaaatttcatctttccaaattgatgggtgggctagtaataaaatatttaaaaaaaaacattcaaaaacatggccacatccaacatttcctcaggcaattccttttgattcttttttcttccccctccatgtagaagagggagaaggagaggctctgaaagctgcttctgggggatttcaagggactgggggtgccaaccacctctggccctgttgtgggggtgtcacagaggcagtggcagcaacaaaggatttgaaacttggtgtgttcgtggagccacaggcagacgatgtcaaccttgtgtgagtgtgacgggggttggggtggggcgggaggccacgggggaggccgaggcaggggctgggcagaggggagaggaagcacaagaagtgggagtgggagaggaagccacgtgctggagagtagacatccccctccttgccgctgggagagccaaggcctatgccacctgcagcgtctgagcggccgcctgtccttggtggccgggggtgggggcctgctgtgggtcagtgtgccaccctctgcagggcagcctgtgggagaagggacagcgggtaaaaagagaaggcaagctggcaggagggtggcacttcgtggatgacctccttagaaaagactgaccttgatgtcttgagagcgctggcctcttcctccctccctgcagggtagggggcctgagttgaggggcttccctctgctccacagaaaccctgttttattgagttctgaaggttggaactgctgccatgattttggccactttgcagacctgggactttagggctaaccagttctctttgtaaggacttgtgcctcttgggagacgtccacccgtttccaagcctgggccactggcatctctggagtgtgtgggggtctgggaggcaggtcccgagccccctgtccttcccacggccactgcagtcaccccgtctgcgccgctgtgctgttgtctgccgtgagagcccaatcactgcctatacccctcatcacacgtcacaatgtcccgaattcccagcctcaccaccccttctcagtaatgaccctggttggttgcaggaggtacctactccatactgagggtgaaattaagggaaggcaaagtccaggcacaagagtgggaccccagcctctcactctcagttccactcatccaactgggaccctcaccacgaatctcatgatctgattcggttccctgtctcctcctcccgtcacagatgtgagccagggcactgctcagctgtgaccctaggtgtttctgccttgttgacatggagagagccctttcccctgagaaggcctggccccttcctgtgctgagcccacagcagcaggctgggtgtcttggttgtcagtggtggcaccaggatggaagggcaaggcacccagggcaggcccacagtcccgctgtcccccacttgcaccctagcttgtagctgccaacctcccagacagcccagcccgctgctcagctccacatgcatagtatcagccctccacacccgacaaaggggaacacacccccttggaaatggttcttttcccccagtcccagctggaagccatgctgtctgttctgctggagcagctgaacatatacatagatgttgccctgccctccccatctgcaccctgttgagttgtagttggatttgtctgtttatgcttggattcaccagagtgactatgatagtgaaaagaaaaaaaaaaaaaaaaaaggacgcatgtatcttgaaatgcttgtaaagaggtttctaacccaccctcacgaggtgtctctcacccccacactgggactcgtgtggcctgtgtggtgccaccctgctggggcctcccaagttttgaaaggctttcctcagcacctgggacccaacagagaccagcttctagcagctaaggaggccgttcagctgtgacgaaggcctgaagcacaggattaggactgaagcgatgatgtccccttccctacttccccttggggctccctgtgtcagggcacagactaggtcttgtggctggtctggcttgcggcgcgaggatggttctctctggtcatagcccgaagtctcatggcagtcccaaaggaggcttacaactcctgcatcacaagaaaaaggaagccactgccagctggggggatctgcagctcccagaagctccgtgagcctcagccacccctcagactgggttcctctccaagctcgccctctggaggggcagcgcagcctcccaccaagggccctgcgaccacagcagggattgggatgaattgcctgtcctggatctgctctagaggcccaagctgcctgcctgaggaaggatgacttgacaagtcaggagacactgttcccaaagccttgaccagagcacctcagcccgctgaccttgcacaaactccatctgctgccatgagaaaagggaagccgcctttgcaaaacattgctgcctaaagaaactcagcagcctcaggcccaattctgccacttctggtttgggtacagttaaaggcaaccctgagggacttggcagtagaaatccagggcctcccctggggctggcagcttcgtgtgcagctagagctttacctgaaaggaagtctctgggcccagaactctccaccaagagcctccctgccgttcgctgagtcccagcaattctcctaagttgaagggatctgagaaggagaaggaaatgtggggtagatttggtggtggttagagatatgcccccctcattactgccaacagtttcggctgcatttcttcacgcacctcggttcctcttcctgaagttcttgtgccctgctcttcagcaccatgggccttcttatacggaaggctctgggatctcccccttgtggggcaggctcttggggccagcctaagatcatggtttagggtgatcagtgctggcagataaattgaaaaggcacgctggcttgtgatcttaaatgaggacaatccccccagggctgggcactcctcccctcccctcacttctcccacctgcagagccagtgtccttgggtgggctagataggatatactgtatgccggctccttcaagctgctgactcactttatcaatagttccatttaaattgacttcagtggtgagactgtatcctgtttgctattgcttgttgtgctatggggggaggggggaggaatgtgtaagatagttaacatgggcaaagggagatcttggggtgcagcacttaaactgcctcgtaacccttttcatgatttcaaccacatttgctagagggagggagcagccacggagttagaggcccttggggtttctcttttccactgacaggctttcccaggcagctggctagttcattccctccccagccaggtgcaggcgtaggaatatggacatctggttgctttggcctgctgccctctttcaggggtcctaagcccacaatcatgcctccctaagaccttggcatccttccctctaagccgttggcacctctgtgccacctctcacactggctccagacacacagcctgtgcttttggagctgagatcactcgcttcaccctcctcatctttgttctccaagtaaagccacgaggtcggggcgagggcagaggtgatcacctgcgtgtcccatctacagacctgcagcttcataaaacttctgatttctcttcagctttgaaaagggttaccctgggcactggcctagagcctcacctcctaatagacttagccccatgagtttgccatgttgagcaggactatttctggcacttgcaagtcccatgatttcttcggtaattctgagggtggggggagggacatgaaatcatcttagcttagctttctgtctgtgaatgtctatatagtgtattgtgtgttttaacaaatgatttacactgactgttgctgtaaaagtgaatttggaaataaagttattactctgattaaa

SEQ ID NO: 512 - DNA, 6644 bp, Homo sapiens
  source 1..6644: mol_type = genomic DNA
gcagtcaccgccacccaccagctccggcaccaacagcagcgccgctgccaccgcccaccttctgccgccgccaccacagccaccttctcctcctccgctgtcctctcccgtcctcgcctctgtcgactatcaggtgaactttgaaccaggatggctgagccccgccaggagttcgaagtgatggaagatcacgctgggacgtacgggttgggggacaggaaagatcaggggggctacaccatgcaccaagaccaagagggtgacacggacgctggcctgaaagaatctcccctgcagacccccactgaggacggatctgaggaaccgggctctgaaacctctgatgctaagagcactccaacagcggaagatgtgacagcacccttagtggatgagggagctcccggcaagcaggctgccgcgcagccccacacggagatcccagaaggaaccacagctgaagaagcaggcattggagacacccccagcctggaagacgaagctgctggtcacgtgacccaagagcctgaaagtggtaaggtggtccaggaaggcttcctccgagagccaggccccccaggtctgagccaccagctcatgtccggcatgcctggggctcccctcctgcctgagggccccagagaggccacacgccaaccttcggggacaggacctgaggacacagagggcggccgccacgcccctgagctgctcaagcaccagcttctaggagacctgcaccaggaggggccgccgctgaagggggcagggggcaaagagaggccggggagcaaggaggaggtggatgaagaccgcgacgtcgatgagtcctccccccaagactcccctccctccaaggcctccccagcccaagatgggcggcctccccagacagccgccagagaagccaccagcatcccaggcttcccagcggagggtgccatccccctccctgtggatttcctctccaaagtttccacagagatcccagcctcagagcccgacgggcccagtgtagggcgggccaaagggcaggatgcccccctggagttcacgtttcacgtggaaatcacacccaacgtgcagaaggagcaggcgcactcggaggagcatttgggaagggctgcatttccaggggcccctggagaggggccagaggcccggggcccctctttgggagaggacacaaaagaggctgaccttccagagccctctgaaaagcagcctgctgctgctccgcgggggaagcccgtcagccgggtccctcaactcaaagctcgcatggtcagtaaaagcaaagacgggactggaagcgatgacaaaaaagccaagacatccacacgttcctctgctaaaaccttgaaaaataggccttgccttagccccaaacaccccactcctggtagctcagaccctctgatccaaccctccagccctgctgtgtgcccagagccaccttcctctcctaaatacgtctcttctgtcacttcccgaactggcagttctggagcaaaggagatgaaactcaagggggctgatggtaaaacgaagatcgccacaccgcggggagcagcccctccaggccagaagggccaggccaacgccaccaggattccagcaaaaaccccgcccgctccaaagacaccacccagctctgcgactaagcaagtccagagaagaccaccccctgcagggcccagatctgagagaggtgaacctccaaaatcaggggatcgcagcggctacagcagccccggctccccaggcactcccggcagccgctcccgcaccccgtcccttccaaccccacccacccgggagcccaagaaggtggcagtggtccgtactccacccaagtcgccgtcttccgccaagagccgcctgcagacagcccccgtgcccatgccagacctgaagaatgtcaagtccaagatcggctccactgagaacctgaagcaccagccgggaggcgggaaggtgcagataattaataagaagctggatcttagcaacgtccagtccaagtgtggctcaaaggataatatcaaacacgtcccgggaggcggcagtgtgcaaatagtctacaaaccagttgacctgagcaaggtgacctccaagtgtggctcattaggcaacatccatcataaaccaggaggtggccaggtggaagtaaaatctgagaagcttgacttcaaggacagagtccagtcgaagattgggtccctggacaatatcacccacgtccctggcggaggaaataaaaagattgaaacccacaagctgaccttccgcgagaacgccaaagccaagacagaccacggggcggagatcgtgtacaagtcgccagtggtgtctggggacacgtctccacggcatctcagcaatgtctcctccaccggcagcatcgacatggtagactcgccccagctcgccacgctagctgacgaggtgtctgcctccctggccaagcagggtttgtgatcaggcccctggggcggtcaataattgtggagaggagagaatgagagagtgtggaaaaaaaaagaataatgacccggcccccgccctctgcccccagctgctcctcgcagttcggttaattggttaatcacttaacctgcttttgtcactcggctttggctcgggacttcaaaatcagtgatgggagtaagagcaaatttcatctttccaaattgatgggtgggctagtaataaaatatttaaaaaaaaacattcaaaaacatggccacatccaacatttcctcaggcaattccttttgattcttttttcttccccctccatgtagaagagggagaaggagaggctctgaaagctgcttctgggggatttcaagggactgggggtgccaaccacctctggccctgttgtgggggtgtcacagaggcagtggcagcaacaaaggatttgaaacttggtgtgttcgtggagccacaggcagacgatgtcaaccttgtgtgagtgtgacgggggttggggtggggcgggaggccacgggggaggccgaggcaggggctgggcagaggggagaggaagcacaagaagtgggagtgggagaggaagccacgtgctggagagtagacatccccctccttgccgctgggagagccaaggcctatgccacctgcagcgtctgagcggccgcctgtccttggtggccgggggtgggggcctgctgtgggtcagtgtgccaccctctgcagggcagcctgtgggagaagggacagcgggtaaaaagagaaggcaagctggcaggagggtggcacttcgtggatgacctccttagaaaagactgaccttgatgtcttgagagcgctggcctcttcctccctccctgcagggtagggggcctgagttgaggggcttccctctgctccacagaaaccctgttttattgagttctgaaggttggaactgctgccatgattttggccactttgcagacctgggactttagggctaaccagttctctttgtaaggacttgtgcctcttgggagacgtccacccgtttccaagcctgggccactggcatctctggagtgtgtgggggtctgggaggcaggtcccgagccccctgtccttcccacggccactgcagtcaccccgtctgcgccgctgtgctgttgtctgccgtgagagcccaatcactgcctatacccctcatcacacgtcacaatgtcccgaattcccagcctcaccaccccttctcagtaatgaccctggttggttgcaggaggtacctactccatactgagggtgaaattaagggaaggcaaagtccaggcacaagagtgggaccccagcctctcactctcagttccactcatccaactgggaccctcaccacgaatctcatgatctgattcggttccctgtctcctcctcccgtcacagatgtgagccagggcactgctcagctgtgaccctaggtgtttctgccttgttgacatggagagagccctttcccctgagaaggcctggccccttcctgtgctgagcccacagcagcaggctgggtgtcttggttgtcagtggtggcaccaggatggaagggcaaggcacccagggcaggcccacagtcccgctgtcccccacttgcaccctagcttgtagctgccaacctcccagacagcccagcccgctgctcagctccacatgcatagtatcagccctccacacccgacaaaggggaacacacccccttggaaatggttcttttcccccagtcccagctggaagccatgctgtctgttctgctggagcagctgaacatatacatagatgttgccctgccctccccatctgcaccctgttgagttgtagttggatttgtctgtttatgcttggattcaccagagtgactatgatagtgaaaagaaaaaaaaaaaaaaaaaaggacgcatgtatcttgaaatgcttgtaaagaggtttctaacccaccctcacgaggtgtctctcacccccacactgggactcgtgtggcctgtgtggtgccaccctgctggggcctcccaagttttgaaaggctttcctcagcacctgggacccaacagagaccagcttctagcagctaaggaggccgttcagctgtgacgaaggcctgaagcacaggattaggactgaagcgatgatgtccccttccctacttccccttggggctccctgtgtcagggcacagactaggtcttgtggctggtctggcttgcggcgcgaggatggttctctctggtcatagcccgaagtctcatggcagtcccaaaggaggcttacaactcctgcatcacaagaaaaaggaagccactgccagctggggggatctgcagctcccagaagctccgtgagcctcagccacccctcagactgggttcctctccaagctcgccctctggaggggcagcgcagcctcccaccaagggccctgcgaccacagcagggattgggatgaattgcctgtcctggatctgctctagaggcccaagctgcctgcctgaggaaggatgacttgacaagtcaggagacactgttcccaaagccttgaccagagcacctcagcccgctgaccttgcacaaactccatctgctgccatgagaaaagggaagccgcctttgcaaaacattgctgcctaaagaaactcagcagcctcaggcccaattctgccacttctggtttgggtacagttaaaggcaaccctgagggacttggcagtagaaatccagggcctcccctggggctggcagcttcgtgtgcagctagagctttacctgaaaggaagtctctgggcccagaactctccaccaagagcctccctgccgttcgctgagtcccagcaattctcctaagttgaagggatctgagaaggagaaggaaatgtggggtagatttggtggtggttagagatatgcccccctcattactgccaacagtttcggctgcatttcttcacgcacctcggttcctcttcctgaagttcttgtgccctgctcttcagcaccatgggccttcttatacggaaggctctgggatctcccccttgtggggcaggctcttggggccagcctaagatcatggtttagggtgatcagtgctggcagataaattgaaaaggcacgctggcttgtgatcttaaatgaggacaatccccccagggctgggcactcctcccctcccctcacttctcccacctgcagagccagtgtccttgggtgggctagataggatatactgtatgccggctccttcaagctgctgactcactttatcaatagttccatttaaattgacttcagtggtgagactgtatcctgtttgctattgcttgttgtgctatggggggaggggggaggaatgtgtaagatagttaacatgggcaaagggagatcttggggtgcagcacttaaactgcctcgtaacccttttcatgatttcaaccacatttgctagagggagggagcagccacggagttagaggcccttggggtttctcttttccactgacaggctttcccaggcagctggctagttcattccctccccagccaggtgcaggcgtaggaatatggacatctggttgctttggcctgctgccctctttcaggggtcctaagcccacaatcatgcctccctaagaccttggcatccttccctctaagccgttggcacctctgtgccacctctcacactggctccagacacacagcctgtgcttttggagctgagatcactcgcttcaccctcctcatctttgttctccaagtaaagccacgaggtcggggcgagggcagaggtgatcacctgcgtgtcccatctacagacctgcagcttcataaaacttctgatttctcttcagctttgaaaagggttaccctgggcactggcctagagcctcacctcctaatagacttagccccatgagtttgccatgttgagcaggactatttctggcacttgcaagtcccatgatttcttcggtaattctgagggtggggggagggacatgaaatcatcttagcttagctttctgtctgtgaatgtctatatagtgtattgtgtgttttaacaaatgatttacactgactgttgctgtaaaagtgaatttggaaataaagttattactctgattaaa

SEQ ID NO: 513 - DNA, 6590 bp, Homo sapiens
  source 1..6590: mol_type = genomic DNA
gcagtcaccgccacccaccagctccggcaccaacagcagcgccgctgccaccgcccaccttctgccgccgccaccacagccaccttctcctcctccgctgtcctctcccgtcctcgcctctgtcgactatcaggtgaactttgaaccaggatggctgagccccgccaggagttcgaagtgatggaagatcacgctgggacgtacgggttgggggacaggaaagatcaggggggctacaccatgcaccaagaccaagagggtgacacggacgctggcctgaaagaatctcccctgcagacccccactgaggacggatctgaggaaccgggctctgaaacctctgatgctaagagcactccaacagcggaagatgtgacagcacccttagtggatgagggagctcccggcaagcaggctgccgcgcagccccacacggagatcccagaaggaaccacagctgaagaagcaggcattggagacacccccagcctggaagacgaagctgctggtcacgtgacccaagagcctgaaagtggtaaggtggtccaggaaggcttcctccgagagccaggccccccaggtctgagccaccagctcatgtccggcatgcctggggctcccctcctgcctgagggccccagagaggccacacgccaaccttcggggacaggacctgaggacacagagggcggccgccacgcccctgagctgctcaagcaccagcttctaggagacctgcaccaggaggggccgccgctgaagggggcagggggcaaagagaggccggggagcaaggaggaggtggatgaagaccgcgacgtcgatgagtcctccccccaagactcccctccctccaaggcctccccagcccaagatgggcggcctccccagacagccgccagagaagccaccagcatcccaggcttcccagcggagggtgccatccccctccctgtggatttcctctccaaagtttccacagagatcccagcctcagagcccgacgggcccagtgtagggcgggccaaagggcaggatgcccccctggagttcacgtttcacgtggaaatcacacccaacgtgcagaaggagcaggcgcactcggaggagcatttgggaagggctgcatttccaggggcccctggagaggggccagaggcccggggcccctctttgggagaggacacaaaagaggctgaccttccagagccctctgaaaagcagcctgctgctgctccgcgggggaagcccgtcagccgggtccctcaactcaaagctcgcatggtcagtaaaagcaaagacgggactggaagcgatgacaaaaaagccaagacatccacacgttcctctgctaaaaccttgaaaaataggccttgccttagccccaaacaccccactcctggtagctcagaccctctgatccaaccctccagccctgctgtgtgcccagagccaccttcctctcctaaatacgtctcttctgtcacttcccgaactggcagttctggagcaaaggagatgaaactcaagggggctgatggtaaaacgaagatcgccacaccgcggggagcagcccctccaggccagaagggccaggccaacgccaccaggattccagcaaaaaccccgcccgctccaaagacaccacccagctctggtgaacctccaaaatcaggggatcgcagcggctacagcagccccggctccccaggcactcccggcagccgctcccgcaccccgtcccttccaaccccacccacccgggagcccaagaaggtggcagtggtccgtactccacccaagtcgccgtcttccgccaagagccgcctgcagacagcccccgtgcccatgccagacctgaagaatgtcaagtccaagatcggctccactgagaacctgaagcaccagccgggaggcgggaaggtgcagataattaataagaagctggatcttagcaacgtccagtccaagtgtggctcaaaggataatatcaaacacgtcccgggaggcggcagtgtgcaaatagtctacaaaccagttgacctgagcaaggtgacctccaagtgtggctcattaggcaacatccatcataaaccaggaggtggccaggtggaagtaaaatctgagaagcttgacttcaaggacagagtccagtcgaagattgggtccctggacaatatcacccacgtccctggcggaggaaataaaaagattgaaacccacaagctgaccttccgcgagaacgccaaagccaagacagaccacggggcggagatcgtgtacaagtcgccagtggtgtctggggacacgtctccacggcatctcagcaatgtctcctccaccggcagcatcgacatggtagactcgccccagctcgccacgctagctgacgaggtgtctgcctccctggccaagcagggtttgtgatcaggcccctggggcggtcaataattgtggagaggagagaatgagagagtgtggaaaaaaaaagaataatgacccggcccccgccctctgcccccagctgctcctcgcagttcggttaattggttaatcacttaacctgcttttgtcactcggctttggctcgggacttcaaaatcagtgatgggagtaagagcaaatttcatctttccaaattgatgggtgggctagtaataaaatatttaaaaaaaaacattcaaaaacatggccacatccaacatttcctcaggcaattccttttgattcttttttcttccccctccatgtagaagagggagaaggagaggctctgaaagctgcttctgggggatttcaagggactgggggtgccaaccacctctggccctgttgtgggggtgtcacagaggcagtggcagcaacaaaggatttgaaacttggtgtgttcgtggagccacaggcagacgatgtcaaccttgtgtgagtgtgacgggggttggggtggggcgggaggccacgggggaggccgaggcaggggctgggcagaggggagaggaagcacaagaagtgggagtgggagaggaagccacgtgctggagagtagacatccccctccttgccgctgggagagccaaggcctatgccacctgcagcgtctgagcggccgcctgtccttggtggccgggggtgggggcctgctgtgggtcagtgtgccaccctctgcagggcagcctgtgggagaagggacagcgggtaaaaagagaaggcaagctggcaggagggtggcacttcgtggatgacctccttagaaaagactgaccttgatgtcttgagagcgctggcctcttcctccctccctgcagggtagggggcctgagttgaggggcttccctctgctccacagaaaccctgttttattgagttctgaaggttggaactgctgccatgattttggccactttgcagacctgggactttagggctaaccagttctctttgtaaggacttgtgcctcttgggagacgtccacccgtttccaagcctgggccactggcatctctggagtgtgtgggggtctgggaggcaggtcccgagccccctgtccttcccacggccactgcagtcaccccgtctgcgccgctgtgctgttgtctgccgtgagagcccaatcactgcctatacccctcatcacacgtcacaatgtcccgaattcccagcctcaccaccccttctcagtaatgaccctggttggttgcaggaggtacctactccatactgagggtgaaattaagggaaggcaaagtccaggcacaagagtgggaccccagcctctcactctcagttccactcatccaactgggaccctcaccacgaatctcatgatctgattcggttccctgtctcctcctcccgtcacagatgtgagccagggcactgctcagctgtgaccctaggtgtttctgccttgttgacatggagagagccctttcccctgagaaggcctggccccttcctgtgctgagcccacagcagcaggctgggtgtcttggttgtcagtggtggcaccaggatggaagggcaaggcacccagggcaggcccacagtcccgctgtcccccacttgcaccctagcttgtagctgccaacctcccagacagcccagcccgctgctcagctccacatgcatagtatcagccctccacacccgacaaaggggaacacacccccttggaaatggttcttttcccccagtcccagctggaagccatgctgtctgttctgctggagcagctgaacatatacatagatgttgccctgccctccccatctgcaccctgttgagttgtagttggatttgtctgtttatgcttggattcaccagagtgactatgatagtgaaaagaaaaaaaaaaaaaaaaaaggacgcatgtatcttgaaatgcttgtaaagaggtttctaacccaccctcacgaggtgtctctcacccccacactgggactcgtgtggcctgtgtggtgccaccctgctggggcctcccaagttttgaaaggctttcctcagcacctgggacccaacagagaccagcttctagcagctaaggaggccgttcagctgtgacgaaggcctgaagcacaggattaggactgaagcgatgatgtccccttccctacttccccttggggctccctgtgtcagggcacagactaggtcttgtggctggtctggcttgcggcgcgaggatggttctctctggtcatagcccgaagtctcatggcagtcccaaaggaggcttacaactcctgcatcacaagaaaaaggaagccactgccagctggggggatctgcagctcccagaagctccgtgagcctcagccacccctcagactgggttcctctccaagctcgccctctggaggggcagcgcagcctcccaccaagggccctgcgaccacagcagggattgggatgaattgcctgtcctggatctgctctagaggcccaagctgcctgcctgaggaaggatgacttgacaagtcaggagacactgttcccaaagccttgaccagagcacctcagcccgctgaccttgcacaaactccatctgctgccatgagaaaagggaagccgcctttgcaaaacattgctgcctaaagaaactcagcagcctcaggcccaattctgccacttctggtttgggtacagttaaaggcaaccctgagggacttggcagtagaaatccagggcctcccctggggctggcagcttcgtgtgcagctagagctttacctgaaaggaagtctctgggcccagaactctccaccaagagcctccctgccgttcgctgagtcccagcaattctcctaagttgaagggatctgagaaggagaaggaaatgtggggtagatttggtggtggttagagatatgcccccctcattactgccaacagtttcggctgcatttcttcacgcacctcggttcctcttcctgaagttcttgtgccctgctcttcagcaccatgggccttcttatacggaaggctctgggatctcccccttgtggggcaggctcttggggccagcctaagatcatggtttagggtgatcagtgctggcagataaattgaaaaggcacgctggcttgtgatcttaaatgaggacaatccccccagggctgggcactcctcccctcccctcacttctcccacctgcagagccagtgtccttgggtgggctagataggatatactgtatgccggctccttcaagctgctgactcactttatcaatagttccatttaaattgacttcagtggtgagactgtatcctgtttgctattgcttgttgtgctatggggggaggggggaggaatgtgtaagatagttaacatgggcaaagggagatcttggggtgcagcacttaaactgcctcgtaacccttttcatgatttcaaccacatttgctagagggagggagcagccacggagttagaggcccttggggtttctcttttccactgacaggctttcccaggcagctggctagttcattccctccccagccaggtgcaggcgtaggaatatggacatctggttgctttggcctgctgccctctttcaggggtcctaagcccacaatcatgcctccctaagaccttggcatccttccctctaagccgttggcacctctgtgccacctctcacactggctccagacacacagcctgtgcttttggagctgagatcactcgcttcaccctcctcatctttgttctccaagtaaagccacgaggtcggggcgagggcagaggtgatcacctgcgtgtcccatctacagacctgcagcttcataaaacttctgatttctcttcagctttgaaaagggttaccctgggcactggcctagagcctcacctcctaatagacttagccccatgagtttgccatgttgagcaggactatttctggcacttgcaagtcccatgatttcttcggtaattctgagggtggggggagggacatgaaatcatcttagcttagctttctgtctgtgaatgtctatatagtgtattgtgtgttttaacaaatgatttacactgactgttgctgtaaaagtgaatttggaaataaagttattactctgattaaa

SEQ ID NO: 514 - DNA, 5837 bp, Homo sapiens
  source 1..5837: mol_type = genomic DNA
gcagtcaccgccacccaccagctccggcaccaacagcagcgccgctgccaccgcccaccttctgccgccgccaccacagccaccttctcctcctccgctgtcctctcccgtcctcgcctctgtcgactatcaggtgaactttgaaccaggatggctgagccccgccaggagttcgaagtgatggaagatcacgctgggacgtacgggttgggggacaggaaagatcaggggggctacaccatgcaccaagaccaagagggtgacacggacgctggcctgaaagaatctcccctgcagacccccactgaggacggatctgaggaaccgggctctgaaacctctgatgctaagagcactccaacagcggaagatgtgacagcacccttagtggatgagggagctcccggcaagcaggctgccgcgcagccccacacggagatcccagaaggaaccacagctgaagaagcaggcattggagacacccccagcctggaagacgaagctgctggtcacgtgacccaagctcgcatggtcagtaaaagcaaagacgggactggaagcgatgacaaaaaagccaagacatccacacgttcctctgctaaaaccttgaaaaataggccttgccttagccccaaacaccccactcctggtagctcagaccctctgatccaaccctccagccctgctgtgtgcccagagccaccttcctctcctaaatacgtctcttctgtcacttcccgaactggcagttctggagcaaaggagatgaaactcaagggggctgatggtaaaacgaagatcgccacaccgcggggagcagcccctccaggccagaagggccaggccaacgccaccaggattccagcaaaaaccccgcccgctccaaagacaccacccagctctggtgaacctccaaaatcaggggatcgcagcggctacagcagccccggctccccaggcactcccggcagccgctcccgcaccccgtcccttccaaccccacccacccgggagcccaagaaggtggcagtggtccgtactccacccaagtcgccgtcttccgccaagagccgcctgcagacagcccccgtgcccatgccagacctgaagaatgtcaagtccaagatcggctccactgagaacctgaagcaccagccgggaggcgggaaggtgcagataattaataagaagctggatcttagcaacgtccagtccaagtgtggctcaaaggataatatcaaacacgtcccgggaggcggcagtgtgcaaatagtctacaaaccagttgacctgagcaaggtgacctccaagtgtggctcattaggcaacatccatcataaaccaggaggtggccaggtggaagtaaaatctgagaagcttgacttcaaggacagagtccagtcgaagattgggtccctggacaatatcacccacgtccctggcggaggaaataaaaagattgaaacccacaagctgaccttccgcgagaacgccaaagccaagacagaccacggggcggagatcgtgtacaagtcgccagtggtgtctggggacacgtctccacggcatctcagcaatgtctcctccaccggcagcatcgacatggtagactcgccccagctcgccacgctagctgacgaggtgtctgcctccctggccaagcagggtttgtgatcaggcccctggggcggtcaataattgtggagaggagagaatgagagagtgtggaaaaaaaaagaataatgacccggcccccgccctctgcccccagctgctcctcgcagttcggttaattggttaatcacttaacctgcttttgtcactcggctttggctcgggacttcaaaatcagtgatgggagtaagagcaaatttcatctttccaaattgatgggtgggctagtaataaaatatttaaaaaaaaacattcaaaaacatggccacatccaacatttcctcaggcaattccttttgattcttttttcttccccctccatgtagaagagggagaaggagaggctctgaaagctgcttctgggggatttcaagggactgggggtgccaaccacctctggccctgttgtgggggtgtcacagaggcagtggcagcaacaaaggatttgaaacttggtgtgttcgtggagccacaggcagacgatgtcaaccttgtgtgagtgtgacgggggttggggtggggcgggaggccacgggggaggccgaggcaggggctgggcagaggggagaggaagcacaagaagtgggagtgggagaggaagccacgtgctggagagtagacatccccctccttgccgctgggagagccaaggcctatgccacctgcagcgtctgagcggccgcctgtccttggtggccgggggtgggggcctgctgtgggtcagtgtgccaccctctgcagggcagcctgtgggagaagggacagcgggtaaaaagagaaggcaagctggcaggagggtggcacttcgtggatgacctccttagaaaagactgaccttgatgtcttgagagcgctggcctcttcctccctccctgcagggtagggggcctgagttgaggggcttccctctgctccacagaaaccctgttttattgagttctgaaggttggaactgctgccatgattttggccactttgcagacctgggactttagggctaaccagttctctttgtaaggacttgtgcctcttgggagacgtccacccgtttccaagcctgggccactggcatctctggagtgtgtgggggtctgggaggcaggtcccgagccccctgtccttcccacggccactgcagtcaccccgtctgcgccgctgtgctgttgtctgccgtgagagcccaatcactgcctatacccctcatcacacgtcacaatgtcccgaattcccagcctcaccaccccttctcagtaatgaccctggttggttgcaggaggtacctactccatactgagggtgaaattaagggaaggcaaagtccaggcacaagagtgggaccccagcctctcactctcagttccactcatccaactgggaccctcaccacgaatctcatgatctgattcggttccctgtctcctcctcccgtcacagatgtgagccagggcactgctcagctgtgaccctaggtgtttctgccttgttgacatggagagagccctttcccctgagaaggcctggccccttcctgtgctgagcccacagcagcaggctgggtgtcttggttgtcagtggtggcaccaggatggaagggcaaggcacccagggcaggcccacagtcccgctgtcccccacttgcaccctagcttgtagctgccaacctcccagacagcccagcccgctgctcagctccacatgcatagtatcagccctccacacccgacaaaggggaacacacccccttggaaatggttcttttcccccagtcccagctggaagccatgctgtctgttctgctggagcagctgaacatatacatagatgttgccctgccctccccatctgcaccctgttgagttgtagttggatttgtctgtttatgcttggattcaccagagtgactatgatagtgaaaagaaaaaaaaaaaaaaaaaaggacgcatgtatcttgaaatgcttgtaaagaggtttctaacccaccctcacgaggtgtctctcacccccacactgggactcgtgtggcctgtgtggtgccaccctgctggggcctcccaagttttgaaaggctttcctcagcacctgggacccaacagagaccagcttctagcagctaaggaggccgttcagctgtgacgaaggcctgaagcacaggattaggactgaagcgatgatgtccccttccctacttccccttggggctccctgtgtcagggcacagactaggtcttgtggctggtctggcttgcggcgcgaggatggttctctctggtcatagcccgaagtctcatggcagtcccaaaggaggcttacaactcctgcatcacaagaaaaaggaagccactgccagctggggggatctgcagctcccagaagctccgtgagcctcagccacccctcagactgggttcctctccaagctcgccctctggaggggcagcgcagcctcccaccaagggccctgcgaccacagcagggattgggatgaattgcctgtcctggatctgctctagaggcccaagctgcctgcctgaggaaggatgacttgacaagtcaggagacactgttcccaaagccttgaccagagcacctcagcccgctgaccttgcacaaactccatctgctgccatgagaaaagggaagccgcctttgcaaaacattgctgcctaaagaaactcagcagcctcaggcccaattctgccacttctggtttgggtacagttaaaggcaaccctgagggacttggcagtagaaatccagggcctcccctggggctggcagcttcgtgtgcagctagagctttacctgaaaggaagtctctgggcccagaactctccaccaagagcctccctgccgttcgctgagtcccagcaattctcctaagttgaagggatctgagaaggagaaggaaatgtggggtagatttggtggtggttagagatatgcccccctcattactgccaacagtttcggctgcatttcttcacgcacctcggttcctcttcctgaagttcttgtgccctgctcttcagcaccatgggccttcttatacggaaggctctgggatctcccccttgtggggcaggctcttggggccagcctaagatcatggtttagggtgatcagtgctggcagataaattgaaaaggcacgctggcttgtgatcttaaatgaggacaatccccccagggctgggcactcctcccctcccctcacttctcccacctgcagagccagtgtccttgggtgggctagataggatatactgtatgccggctccttcaagctgctgactcactttatcaatagttccatttaaattgacttcagtggtgagactgtatcctgtttgctattgcttgttgtgctatggggggaggggggaggaatgtgtaagatagttaacatgggcaaagggagatcttggggtgcagcacttaaactgcctcgtaacccttttcatgatttcaaccacatttgctagagggagggagcagccacggagttagaggcccttggggtttctcttttccactgacaggctttcccaggcagctggctagttcattccctccccagccaggtgcaggcgtaggaatatggacatctggttgctttggcctgctgccctctttcaggggtcctaagcccacaatcatgcctccctaagaccttggcatccttccctctaagccgttggcacctctgtgccacctctcacactggctccagacacacagcctgtgcttttggagctgagatcactcgcttcaccctcctcatctttgttctccaagtaaagccacgaggtcggggcgagggcagaggtgatcacctgcgtgtcccatctacagacctgcagcttcataaaacttctgatttctcttcagctttgaaaagggttaccctgggcactggcctagagcctcacctcctaatagacttagccccatgagtttgccatgttgagcaggactatttctggcacttgcaagtcccatgatttcttcggtaattctgagggtggggggagggacatgaaatcatcttagcttagctttctgtctgtgaatgtctatatagtgtattgtgtgttttaacaaatgatttacactgactgttgctgtaaaagtgaatttggaaataaagttattactctgattaaa

SEQ ID NO: 515 - DNA, 5744 bp, Homo sapiens
  source 1..5744: mol_type = genomic DNA
gcagtcaccgccacccaccagctccggcaccaacagcagcgccgctgccaccgcccaccttctgccgccgccaccacagccaccttctcctcctccgctgtcctctcccgtcctcgcctctgtcgactatcaggtgaactttgaaccaggatggctgagccccgccaggagttcgaagtgatggaagatcacgctgggacgtacgggttgggggacaggaaagatcaggggggctacaccatgcaccaagaccaagagggtgacacggacgctggcctgaaagaatctcccctgcagacccccactgaggacggatctgaggaaccgggctctgaaacctctgatgctaagagcactccaacagcggaagatgtgacagcacccttagtggatgagggagctcccggcaagcaggctgccgcgcagccccacacggagatcccagaaggaaccacagctgaagaagcaggcattggagacacccccagcctggaagacgaagctgctggtcacgtgacccaagctcgcatggtcagtaaaagcaaagacgggactggaagcgatgacaaaaaagccaagacatccacacgttcctctgctaaaaccttgaaaaataggccttgccttagccccaaacaccccactcctggtagctcagaccctctgatccaaccctccagccctgctgtgtgcccagagccaccttcctctcctaaatacgtctcttctgtcacttcccgaactggcagttctggagcaaaggagatgaaactcaagggggctgatggtaaaacgaagatcgccacaccgcggggagcagcccctccaggccagaagggccaggccaacgccaccaggattccagcaaaaaccccgcccgctccaaagacaccacccagctctggtgaacctccaaaatcaggggatcgcagcggctacagcagccccggctccccaggcactcccggcagccgctcccgcaccccgtcccttccaaccccacccacccgggagcccaagaaggtggcagtggtccgtactccacccaagtcgccgtcttccgccaagagccgcctgcagacagcccccgtgcccatgccagacctgaagaatgtcaagtccaagatcggctccactgagaacctgaagcaccagccgggaggcgggaaggtgcaaatagtctacaaaccagttgacctgagcaaggtgacctccaagtgtggctcattaggcaacatccatcataaaccaggaggtggccaggtggaagtaaaatctgagaagcttgacttcaaggacagagtccagtcgaagattgggtccctggacaatatcacccacgtccctggcggaggaaataaaaagattgaaacccacaagctgaccttccgcgagaacgccaaagccaagacagaccacggggcggagatcgtgtacaagtcgccagtggtgtctggggacacgtctccacggcatctcagcaatgtctcctccaccggcagcatcgacatggtagactcgccccagctcgccacgctagctgacgaggtgtctgcctccctggccaagcagggtttgtgatcaggcccctggggcggtcaataattgtggagaggagagaatgagagagtgtggaaaaaaaaagaataatgacccggcccccgccctctgcccccagctgctcctcgcagttcggttaattggttaatcacttaacctgcttttgtcactcggctttggctcgggacttcaaaatcagtgatgggagtaagagcaaatttcatctttccaaattgatgggtgggctagtaataaaatatttaaaaaaaaacattcaaaaacatggccacatccaacatttcctcaggcaattccttttgattcttttttcttccccctccatgtagaagagggagaaggagaggctctgaaagctgcttctgggggatttcaagggactgggggtgccaaccacctctggccctgttgtgggggtgtcacagaggcagtggcagcaacaaaggatttgaaacttggtgtgttcgtggagccacaggcagacgatgtcaaccttgtgtgagtgtgacgggggttggggtggggcgggaggccacgggggaggccgaggcaggggctgggcagaggggagaggaagcacaagaagtgggagtgggagaggaagccacgtgctggagagtagacatccccctccttgccgctgggagagccaaggcctatgccacctgcagcgtctgagcggccgcctgtccttggtggccgggggtgggggcctgctgtgggtcagtgtgccaccctctgcagggcagcctgtgggagaagggacagcgggtaaaaagagaaggcaagctggcaggagggtggcacttcgtggatgacctccttagaaaagactgaccttgatgtcttgagagcgctggcctcttcctccctccctgcagggtagggggcctgagttgaggggcttccctctgctccacagaaaccctgttttattgagttctgaaggttggaactgctgccatgattttggccactttgcagacctgggactttagggctaaccagttctctttgtaaggacttgtgcctcttgggagacgtccacccgtttccaagcctgggccactggcatctctggagtgtgtgggggtctgggaggcaggtcccgagccccctgtccttcccacggccactgcagtcaccccgtctgcgccgctgtgctgttgtctgccgtgagagcccaatcactgcctatacccctcatcacacgtcacaatgtcccgaattcccagcctcaccaccccttctcagtaatgaccctggttggttgcaggaggtacctactccatactgagggtgaaattaagggaaggcaaagtccaggcacaagagtgggaccccagcctctcactctcagttccactcatccaactgggaccctcaccacgaatctcatgatctgattcggttccctgtctcctcctcccgtcacagatgtgagccagggcactgctcagctgtgaccctaggtgtttctgccttgttgacatggagagagccctttcccctgagaaggcctggccccttcctgtgctgagcccacagcagcaggctgggtgtcttggttgtcagtggtggcaccaggatggaagggcaaggcacccagggcaggcccacagtcccgctgtcccccacttgcaccctagcttgtagctgccaacctcccagacagcccagcccgctgctcagctccacatgcatagtatcagccctccacacccgacaaaggggaacacacccccttggaaatggttcttttcccccagtcccagctggaagccatgctgtctgttctgctggagcagctgaacatatacatagatgttgccctgccctccccatctgcaccctgttgagttgtagttggatttgtctgtttatgcttggattcaccagagtgactatgatagtgaaaagaaaaaaaaaaaaaaaaaaggacgcatgtatcttgaaatgcttgtaaagaggtttctaacccaccctcacgaggtgtctctcacccccacactgggactcgtgtggcctgtgtggtgccaccctgctggggcctcccaagttttgaaaggctttcctcagcacctgggacccaacagagaccagcttctagcagctaaggaggccgttcagctgtgacgaaggcctgaagcacaggattaggactgaagcgatgatgtccccttccctacttccccttggggctccctgtgtcagggcacagactaggtcttgtggctggtctggcttgcggcgcgaggatggttctctctggtcatagcccgaagtctcatggcagtcccaaaggaggcttacaactcctgcatcacaagaaaaaggaagccactgccagctggggggatctgcagctcccagaagctccgtgagcctcagccacccctcagactgggttcctctccaagctcgccctctggaggggcagcgcagcctcccaccaagggccctgcgaccacagcagggattgggatgaattgcctgtcctggatctgctctagaggcccaagctgcctgcctgaggaaggatgacttgacaagtcaggagacactgttcccaaagccttgaccagagcacctcagcccgctgaccttgcacaaactccatctgctgccatgagaaaagggaagccgcctttgcaaaacattgctgcctaaagaaactcagcagcctcaggcccaattctgccacttctggtttgggtacagttaaaggcaaccctgagggacttggcagtagaaatccagggcctcccctggggctggcagcttcgtgtgcagctagagctttacctgaaaggaagtctctgggcccagaactctccaccaagagcctccctgccgttcgctgagtcccagcaattctcctaagttgaagggatctgagaaggagaaggaaatgtggggtagatttggtggtggttagagatatgcccccctcattactgccaacagtttcggctgcatttcttcacgcacctcggttcctcttcctgaagttcttgtgccctgctcttcagcaccatgggccttcttatacggaaggctctgggatctcccccttgtggggcaggctcttggggccagcctaagatcatggtttagggtgatcagtgctggcagataaattgaaaaggcacgctggcttgtgatcttaaatgaggacaatccccccagggctgggcactcctcccctcccctcacttctcccacctgcagagccagtgtccttgggtgggctagataggatatactgtatgccggctccttcaagctgctgactcactttatcaatagttccatttaaattgacttcagtggtgagactgtatcctgtttgctattgcttgttgtgctatggggggaggggggaggaatgtgtaagatagttaacatgggcaaagggagatcttggggtgcagcacttaaactgcctcgtaacccttttcatgatttcaaccacatttgctagagggagggagcagccacggagttagaggcccttggggtttctcttttccactgacaggctttcccaggcagctggctagttcattccctccccagccaggtgcaggcgtaggaatatggacatctggttgctttggcctgctgccctctttcaggggtcctaagcccacaatcatgcctccctaagaccttggcatccttccctctaagccgttggcacctctgtgccacctctcacactggctccagacacacagcctgtgcttttggagctgagatcactcgcttcaccctcctcatctttgttctccaagtaaagccacgaggtcggggcgagggcagaggtgatcacctgcgtgtcccatctacagacctgcagcttcataaaacttctgatttctcttcagctttgaaaagggttaccctgggcactggcctagagcctcacctcctaatagacttagccccatgagtttgccatgttgagcaggactatttctggcacttgcaagtcccatgatttcttcggtaattctgagggtggggggagggacatgaaatcatcttagcttagctttctgtctgtgaatgtctatatagtgtattgtgtgttttaacaaatgatttacactgactgttgctgtaaaagtgaatttggaaataaagttattactctgattaaa

SEQ ID NO: 516 - DNA, 5744 bp, Homo sapiens; identical to SEQ ID NO: 515
  source 1..5744: mol_type = genomic DNA

SEQ ID NO: 517 - DNA, 5546 bp, Homo sapiens
  source 1..5546: mol_type = genomic DNA
gcagtcaccgccacccaccagctccggcaccaacagcagcgccgctgccaccgcccaccttctgccgccgccaccacagccaccttctcctcctccgctgtcctctcccgtcctcgcctctgtcgactatcaggtgaactttgaaccaggatggctgagccccgccaggagttcgaagtgatggaagatcacgctgggacgtacgggttgggggacaggaaagatcaggggggctacaccatgcaccaagaccaagagggtgacacggacgctggcctgaaagaatctcccctgcagacccccactgaggacggatctgaggaaccgggctctgaaacctctgatgctaagagcactccaacagcggaagatgtgacagcacccttagtggatgagggagctcccggcaagcaggctgccgcgcagccccacacggagatcccagaaggaaccacagctgaagaagcaggcattggagacacccccagcctggaagacgaagctgctggtcacgtgacccaagctcgcatggtcagtaaaagcaaagacgggactggaagcgatgacaaaaaagccaagggggctgatggtaaaacgaagatcgccacaccgcggggagcagcccctccaggccagaagggccaggccaacgccaccaggattccagcaaaaaccccgcccgctccaaagacaccacccagctctggtgaacctccaaaatcaggggatcgcagcggctacagcagccccggctccccaggcactcccggcagccgctcccgcaccccgtcccttccaaccccacccacccgggagcccaagaaggtggcagtggtccgtactccacccaagtcgccgtcttccgccaagagccgcctgcagacagcccccgtgcccatgccagacctgaagaatgtcaagtccaagatcggctccactgagaacctgaagcaccagccgggaggcgggaaggtgcaaatagtctacaaaccagttgacctgagcaaggtgacctccaagtgtggctcattaggcaacatccatcataaaccaggaggtggccaggtggaagtaaaatctgagaagcttgacttcaaggacagagtccagtcgaagattgggtccctggacaatatcacccacgtccctggcggaggaaataaaaagattgaaacccacaagctgaccttccgcgagaacgccaaagccaagacagaccacggggcggagatcgtgtacaagtcgccagtggtgtctggggacacgtctccacggcatctcagcaatgtctcctccaccggcagcatcgacatggtagactcgccccagctcgccacgctagctgacgaggtgtctgcctccctggccaagcagggtttgtgatcaggcccctggggcggtcaataattgtggagaggagagaatgagagagtgtggaaaaaaaaagaataatgacccggcccccgccctctgcccccagctgctcctcgcagttcggttaattggttaatcacttaacctgcttttgtcactcggctttggctcgggacttcaaaatcagtgatgggagtaagagcaaatttcatctttccaaattgatgggtgggctagtaataaaatatttaaaaaaaaacattcaaaaacatggccacatccaacatttcctcaggcaattccttttgattcttttttcttccccctccatgtagaagagggagaaggagaggctctgaaagctgcttctgggggatttcaagggactgggggtgccaaccacctctggccctgttgtgggggtgtcacagaggcagtggcagcaacaaaggatttgaaacttggtgtgttcgtggagccacaggcagacgatgtcaaccttgtgtgagtgtgacgggggttggggtggggcgggaggccacgggggaggccgaggcaggggctgggcagaggggagaggaagcacaagaagtgggagtgggagaggaagccacgtgctggagagtagacatccccctccttgccgctgggagagccaaggcctatgccacctgcagcgtctgagcggccgcctgtccttggtggccgggggtgggggcctgctgtgggtcagtgtgccaccctctgcagggcagcctgtgggagaagggacagcgggtaaaaagagaaggcaagctggcaggagggtggcacttcgtggatgacctccttagaaaagactgaccttgatgtcttgagagcgctggcctcttcctccctccctgcagggtagggggcctgagttgaggggcttccctctgctccacagaaaccctgttttattgagttctgaaggttggaactgctgccatgattttggccactttgcagacctgggactttagggctaaccagttctctttgtaaggacttgtgcctcttgggagacgtccacccgtttccaagcctgggccactggcatctctggagtgtgtgggggtctgggaggcaggtcccgagccccctgtccttcccacggccactgcagtcaccccgtctgcgccgctgtgctgttgtctgccgtgagagcccaatcactgcctatacccctcatcacacgtcacaatgtcccgaattcccagcctcaccaccccttctcagtaatgaccctggttggttgcaggaggtacctactccatactgagggtgaaattaagggaaggcaaagtccaggcacaagagtgggaccccagcctctcactctcagttccactcatccaactgggaccctcaccacgaatctcatgatctgattcggttccctgtctcctcctcccgtcacagatgtgagccagggcactgctcagctgtgaccctaggtgtttctgccttgttgacatggagagagccctttcccctgagaaggcctggccccttcctgtgctgagcccacagcagcaggctgggtgtcttggttgtcagtggtggcaccaggatggaagggcaaggcacccagggcaggcccacagtcccgctgtcccccacttgcaccctagcttgtagctgccaacctcccagacagcccagcccgctgctcagctccacatgcatagtatcagccctccacacccgacaaaggggaacacacccccttggaaatggttcttttcccccagtcccagctggaagccatgctgtctgttctgctggagcagctgaacatatacatagatgttgccctgccctccccatctgcaccctgttgagttgtagttggatttgtctgtttatgcttggattcaccagagtgactatgatagtgaaaagaaaaaaaaaaaaaaaaaaggacgcatgtatcttgaaatgcttgtaaagaggtttctaacccaccctcacgaggtgtctctcacccccacactgggactcgtgtggcctgtgtggtgccaccctgctggggcctcccaagttttgaaaggctttcctcagcacctgggacccaacagagaccagcttctagcagctaaggaggccgttcagctgtgacgaaggcctgaagcacaggattaggactgaagcgatgatgtccccttccctacttccccttggggctccctgtgtcagggcacagactaggtcttgtggctggtctggcttgcggcgcgaggatggttctctctggtcatagcccgaagtctcatggcagtcccaaaggaggcttacaactcctgcatcacaagaaaaaggaagccactgccagctggggggatctgcagctcccagaagctccgtgagcctcagccacccctcagactgggttcctctccaagctcgccctctggaggggcagcgcagcctcccaccaagggccctgcgaccacagcagggattgggatgaattgcctgtcctggatctgctctagaggcccaagctgcctgcctgaggaaggatgacttgacaagtcaggagacactgttcccaaagccttgaccagagcacctcagcccgctgaccttgcacaaactccatctgctgccatgagaaaagggaagccgcctttgcaaaacattgctgcctaaagaaactcagcagcctcaggcccaattctgccacttctggtttgggtacagttaaaggcaaccctgagggacttggcagtagaaatccagggcctcccctggggctggcagcttcgtgtgcagctagagctttacctgaaaggaagtctctgggcccagaactctccaccaagagcctccctgccgttcgctgagtcccagcaattctcctaagttgaagggatctgagaaggagaaggaaatgtggggtagatttggtggtggttagagatatgcccccctcattactgccaacagtttcggctgcatttcttcacgcacctcggttcctcttcctgaagttcttgtgccctgctcttcagcaccatgggccttcttatacggaaggctctgggatctcccccttgtggggcaggctcttggggccagcctaagatcatggtttagggtgatcagtgctggcagataaattgaaaaggcacgctggcttgtgatcttaaatgaggacaatccccccagggctgggcactcctcccctcccctcacttctcccacctgcagagccagtgtccttgggtgggctagataggatatactgtatgccggctccttcaagctgctgactcactttatcaatagttccatttaaattgacttcagtggtgagactgtatcctgtttgctattgcttgttgtgctatggggggaggggggaggaatgtgtaagatagttaacatgggcaaagggagatcttggggtgcagcacttaaactgcctcgtaacccttttcatgatttcaaccacatttgctagagggagggagcagccacggagttagaggcccttggggtttctcttttccactgacaggctttcccaggcagctggctagttcattccctccccagccaggtgcaggcgtaggaatatggacatctggttgctttggcctgctgccctctttcaggggtcctaagcccacaatcatgcctccctaagaccttggcatccttccctctaagccgttggcacctctgtgccacctctcacactggctccagacacacagcctgtgcttttggagctgagatcactcgcttcaccctcctcatctttgttctccaagtaaagccacgaggtcggggcgagggcagaggtgatcacctgcgtgtcccatctacagacctgcagcttcataaaacttctgatttctcttcagctttgaaaagggttaccctgggcactggcctagagcctcacctcctaatagacttagccccatgagtttgccatgttgagcaggactatttctggcacttgcaagtcccatgatttcttcggtaattctgagggtggggggagggacatgaaatcatcttagcttagctttctgtctgtgaatgtctatatagtgtattgtgtgttttaacaaatgatttacactgactgttgctgtaaaagtgaatttggaaataaagttattactctgattaaa

SEQ ID NO: 518 - DNA, 6815 bp, Homo sapiens
  source 1..6815: mol_type = genomic DNA
gcagtcaccgccacccaccagctccggcaccaacagcagcgccgctgccaccgcccaccttctgccgccgccaccacagccaccttctcctcctccgctgtcctctcccgtcctcgcctctgtcgactatcaggtgaactttgaaccaggatggctgagccccgccaggagttcgaagtgatggaagatcacgctgggacgtacgggttgggggacaggaaagatcaggggggctacaccatgcaccaagaccaagagggtgacacggacgctggcctgaaagaatctcccctgcagacccccactgaggacggatctgaggaaccgggctctgaaacctctgatgctaagagcactccaacagcggaagctgaagaagcaggcattggagacacccccagcctggaagacgaagctgctggtcacgtgacccaagaggagttgagagttccgggccggcagaggaaggcgcctgaaaggcccctggccaatgagattagcgcccacgtccagcctggaccctgcggagaggcctctggggtctctgggccgtgcctcggggagaaagagccagaagctcccgtcccgctgaccgcgagccttcctcagcaccgtcccgtttgcccagcgcctcctccaacaggaggccctcaggagccctccctggagtggggacaaaaaggcggggactgggccgagaagggtccggcctttccgaagcccgccaccactgcgtatctccacacagagcctgaaagtggtaaggtggtccaggaaggcttcctccgagagccaggccccccaggtctgagccaccagctcatgtccggcatgcctggggctcccctcctgcctgagggccccagagaggccacacgccaaccttcggggacaggacctgaggacacagagggcggccgccacgcccctgagctgctcaagcaccagcttctaggagacctgcaccaggaggggccgccgctgaagggggcagggggcaaagagaggccggggagcaaggaggaggtggatgaagaccgcgacgtcgatgagtcctccccccaagactcccctccctccaaggcctccccagcccaagatgggcggcctccccagacagccgccagagaagccaccagcatcccaggcttcccagcggagggtgccatccccctccctgtggatttcctctccaaagtttccacagagatcccagcctcagagcccgacgggcccagtgtagggcgggccaaagggcaggatgcccccctggagttcacgtttcacgtggaaatcacacccaacgtgcagaaggagcaggcgcactcggaggagcatttgggaagggctgcatttccaggggcccctggagaggggccagaggcccggggcccctctttgggagaggacacaaaagaggctgaccttccagagccctctgaaaagcagcctgctgctgctccgcgggggaagcccgtcagccgggtccctcaactcaaagctcgcatggtcagtaaaagcaaagacgggactggaagcgatgacaaaaaagccaagacatccacacgttcctctgctaaaaccttgaaaaataggccttgccttagccccaaacaccccactcctggtagctcagaccctctgatccaaccctccagccctgctgtgtgcccagagccaccttcctctcctaaatacgtctcttctgtcacttcccgaactggcagttctggagcaaaggagatgaaactcaagggggctgatggtaaaacgaagatcgccacaccgcggggagcagcccctccaggccagaagggccaggccaacgccaccaggattccagcaaaaaccccgcccgctccaaagacaccacccagctctggtgaacctccaaaatcaggggatcgcagcggctacagcagccccggctccccaggcactcccggcagccgctcccgcaccccgtcccttccaaccccacccacccgggagcccaagaaggtggcagtggtccgtactccacccaagtcgccgtcttccgccaagagccgcctgcagacagcccccgtgcccatgccagacctgaagaatgtcaagtccaagatcggctccactgagaacctgaagcaccagccgggaggcgggaaggtgcagataattaataagaagctggatcttagcaacgtccagtccaagtgtggctcaaaggataatatcaaacacgtcccgggaggcggcagtgtgcaaatagtctacaaaccagttgacctgagcaaggtgacctccaagtgtggctcattaggcaacatccatcataaaccaggaggtggccaggtggaagtaaaatctgagaagcttgacttcaaggacagagtccagtcgaagattgggtccctggacaatatcacccacgtccctggcggaggaaataaaaagattgaaacccacaagctgaccttccgcgagaacgccaaagccaagacagaccacggggcggagatcgtgtacaagtcgccagtggtgtctggggacacgtctccacggcatctcagcaatgtctcctccaccggcagcatcgacatggtagactcgccccagctcgccacgctagctgacgaggtgtctgcctccctggccaagcagggtttgtgatcaggcccctggggcggtcaataattgtggagaggagagaatgagagagtgtggaaaaaaaaagaataatgacccggcccccgccctctgcccccagctgctcctcgcagttcggttaattggttaatcacttaacctgcttttgtcactcggctttggctcgggacttcaaaatcagtgatgggagtaagagcaaatttcatctttccaaattgatgggtgggctagtaataaaatatttaaaaaaaaacattcaaaaacatggccacatccaacatttcctcaggcaattccttttgattcttttttcttccccctccatgtagaagagggagaaggagaggctctgaaagctgcttctgggggatttcaagggactgggggtgccaaccacctctggccctgttgtgggggtgtcacagaggcagtggcagcaacaaaggatttgaaacttggtgtgttcgtggagccacaggcagacgatgtcaaccttgtgtgagtgtgacgggggttggggtggggcgggaggccacgggggaggccgaggcaggggctgggcagaggggagaggaagcacaagaagtgggagtgggagaggaagccacgtgctggagagtagacatccccctccttgccgctgggagagccaaggcctatgccacctgcagcgtctgagcggccgcctgtccttggtggccgggggtgggggcctgctgtgggtcagtgtgccaccctctgcagggcagcctgtgggagaagggacagcgggtaaaaagagaaggcaagctggcaggagggtggcacttcgtggatgacctccttagaaaagactgaccttgatgtcttgagagcgctggcctcttcctccctccctgcagggtagggggcctgagttgaggggcttccctctgctccacagaaaccctgttttattgagttctgaaggttggaactgctgccatgattttggccactttgcagacctgggactttagggctaaccagttctctttgtaaggacttgtgcctcttgggagacgtccacccgtttccaagcctgggccactggcatctctggagtgtgtgggggtctgggaggcaggtcccgagccccctgtccttcccacggccactgcagtcaccccgtctgcgccgctgtgctgttgtctgccgtgagagcccaatcactgcctatacccctcatcacacgtcacaatgtcccgaattcccagcctcaccaccccttctcagtaatgaccctggttggttgcaggaggtacctactccatactgagggtgaaattaagggaaggcaaagtccaggcacaagagtgggaccccagcctctcactctcagttccactcatccaactgggaccctcaccacgaatctcatgatctgattcggttccctgtctcctcctcccgtcacagatgtgagccagggcactgctcagctgtgaccctaggtgtttctgccttgttgacatggagagagccctttcccctgagaaggcctggccccttcctgtgctgagcccacagcagcaggctgggtgtcttggttgtcagtggtggcaccaggatggaagggcaaggcacccagggcaggcccacagtcccgctgtcccccacttgcaccctagcttgtagctgccaacctcccagacagcccagcccgctgctcagctccacatgcatagtatcagccctccacacccgacaaaggggaacacacccccttggaaatggttcttttcccccagtcccagctggaagccatgctgtctgttctgctggagcagctgaacatatacatagatgttgccctgccctccccatctgcaccctgttgagttgtagttggatttgtctgtttatgcttggattcaccagagtgactatgatagtgaaaagaaaaaaaaaaaaaaaaaaggacgcatgtatcttgaaatgcttgtaaagaggtttctaacccaccctcacgaggtgtctctcacccccacactgggactcgtgtggcctgtgtggtgccaccctgctggggcctcccaagttttgaaaggctttcctcagcacctgggacccaacagagaccagcttctagcagctaaggaggccgttcagctgtgacgaaggcctgaagcacaggattaggactgaagcgatgatgtccccttccctacttccccttggggctccctgtgtcagggcacagactaggtcttgtggctggtctggcttgcggcgcgaggatggttctctctggtcatagcccgaagtctcatggcagtcccaaaggaggcttacaactcctgcatcacaagaaaaaggaagccactgccagctggggggatctgcagctcccagaagctccgtgagcctcagccacccctcagactgggttcctctccaagctcgccctctggaggggcagcgcagcctcccaccaagggccctgcgaccacagcagggattgggatgaattgcctgtcctggatctgctctagaggcccaagctgcctgcctgaggaaggatgacttgacaagtcaggagacactgttcccaaagccttgaccagagcacctcagcccgctgaccttgcacaaactccatctgctgccatgagaaaagggaagccgcctttgcaaaacattgctgcctaaagaaactcagcagcctcaggcccaattctgccacttctggtttgggtacagttaaaggcaaccctgagggacttggcagtagaaatccagggcctcccctggggctggcagcttcgtgtgcagctagagctttacctgaaaggaagtctctgggcccagaactctccaccaagagcctccctgccgttcgctgagtcccagcaattctcctaagttgaagggatctgagaaggagaaggaaatgtggggtagatttggtggtggttagagatatgcccccctcattactgccaacagtttcggctgcatttcttcacgcacctcggttcctcttcctgaagttcttgtgccctgctcttcagcaccatgggccttcttatacggaaggctctgggatctcccccttgtggggcaggctcttggggccagcctaagatcatggtttagggtgatcagtgctggcagataaattgaaaaggcacgctggcttgtgatcttaaatgaggacaatccccccagggctgggcactcctcccctcccctcacttctcccacctgcagagccagtgtccttgggtgggctagataggatatactgtatgccggctccttcaagctgctgactcactttatcaatagttccatttaaattgacttcagtggtgagactgtatcctgtttgctattgcttgttgtgctatggggggaggggggaggaatgtgtaagatagttaacatgggcaaagggagatcttggggtgcagcacttaaactgcctcgtaacccttttcatgatttcaaccacatttgctagagggagggagcagccacggagttagaggcccttggggtttctcttttccactgacaggctttcccaggcagctggctagttcattccctccccagccaggtgcaggcgtaggaatatggacatctggttgctttggcctgctgccctctttcaggggtcctaagcccacaatcatgcctccctaagaccttggcatccttccctctaagccgttggcacctctgtgccacctctcacactggctccagacacacagcctgtgcttttggagctgagatcactcgcttcaccctcctcatctttgttctccaagtaaagccacgaggtcggggcgagggcagaggtgatcacctgcgtgtcccatctacagacctgcagcttcataaaacttctgatttctcttcagctttgaaaagggttaccctgggcactggcctagagcctcacctcctaatagacttagccccatgagtttgccatgttgagcaggactatttctggcacttgcaagtcccatgatttcttcggtaattctgagggtggggggagggacatgaaatcatcttagcttagctttctgtctgtgaatgtctatatagtgtattgtgtgttttaacaaatgatttacactgactgttgctgtaaaagtgaatttggaaataaagttattactctgattaaa

SEQ ID NO: 519 - DNA, 6722 bp, Homo sapiens
  source 1..6722: mol_type = genomic DNA
gcagtcaccgccacccaccagctccggcaccaacagcagcgccgctgccaccgcccaccttctgccgccgccaccacagccaccttctcctcctccgctgtcctctcccgtcctcgcctctgtcgactatcaggtgaactttgaaccaggatggctgagccccgccaggagttcgaagtgatggaagatcacgctgggacgtacgggttgggggacaggaaagatcaggggggctacaccatgcaccaagaccaagagggtgacacggacgctggcctgaaagaatctcccctgcagacccccactgaggacggatctgaggaaccgggctctgaaacctctgatgctaagagcactccaacagcggaagctgaagaagcaggcattggagacacccccagcctggaagacgaagctgctggtcacgtgacccaagaggagttgagagttccgggccggcagaggaaggcgcctgaaaggcccctggccaatgagattagcgcccacgtccagcctggaccctgcggagaggcctctggggtctctgggccgtgcctcggggagaaagagccagaagctcccgtcccgctgaccgcgagccttcctcagcaccgtcccgtttgcccagcgcctcctccaacaggaggccctcaggagccctccctggagtggggacaaaaaggcggggactgggccgagaagggtccggcctttccgaagcccgccaccactgcgtatctccacacagagcctgaaagtggtaaggtggtccaggaaggcttcctccgagagccaggccccccaggtctgagccaccagctcatgtccggcatgcctggggctcccctcctgcctgagggccccagagaggccacacgccaaccttcggggacaggacctgaggacacagagggcggccgccacgcccctgagctgctcaagcaccagcttctaggagacctgcaccaggaggggccgccgctgaagggggcagggggcaaagagaggccggggagcaaggaggaggtggatgaagaccgcgacgtcgatgagtcctccccccaagactcccctccctccaaggcctccccagcccaagatgggcggcctccccagacagccgccagagaagccaccagcatcccaggcttcccagcggagggtgccatccccctccctgtggatttcctctccaaagtttccacagagatcccagcctcagagcccgacgggcccagtgtagggcgggccaaagggcaggatgcccccctggagttcacgtttcacgtggaaatcacacccaacgtgcagaaggagcaggcgcactcggaggagcatttgggaagggctgcatttccaggggcccctggagaggggccagaggcccggggcccctctttgggagaggacacaaaagaggctgaccttccagagccctctgaaaagcagcctgctgctgctccgcgggggaagcccgtcagccgggtccctcaactcaaagctcgcatggtcagtaaaagcaaagacgggactggaagcgatgacaaaaaagccaagacatccacacgttcctctgctaaaaccttgaaaaataggccttgccttagccccaaacaccccactcctggtagctcagaccctctgatccaaccctccagccctgctgtgtgcccagagccaccttcctctcctaaatacgtctcttctgtcacttcccgaactggcagttctggagcaaaggagatgaaactcaagggggctgatggtaaaacgaagatcgccacaccgcggggagcagcccctccaggccagaagggccaggccaacgccaccaggattccagcaaaaaccccgcccgctccaaagacaccacccagctctggtgaacctccaaaatcaggggatcgcagcggctacagcagccccggctccccaggcactcccggcagccgctcccgcaccccgtcccttccaaccccacccacccgggagcccaagaaggtggcagtggtccgtactccacccaagtcgccgtcttccgccaagagccgcctgcagacagcccccgtgcccatgccagacctgaagaatgtcaagtccaagatcggctccactgagaacctgaagcaccagccgggaggcgggaaggtgcaaatagtctacaaaccagttgacctgagcaaggtgacctccaagtgtggctcattaggcaacatccatcataaaccaggaggtggccaggtggaagtaaaatctgagaagcttgacttcaaggacagagtccagtcgaagattgggtccctggacaatatcacccacgtccctggcggaggaaataaaaagattgaaacccacaagctgaccttccgcgagaacgccaaagccaagacagaccacggggcggagatcgtgtacaagtcgccagtggtgtctggggacacgtctccacggcatctcagcaatgtctcctccaccggcagcatcgacatggtagactcgccccagctcgccacgctagctgacgaggtgtctgcctccctggccaagcagggtttgtgatcaggcccctggggcggtcaataattgtggagaggagagaatgagagagtgtggaaaaaaaaagaataatgacccggcccccgccctctgcccccagctgctcctcgcagttcggttaattggttaatcacttaacctgcttttgtcactcggctttggctcgggacttcaaaatcagtgatgggagtaagagcaaatttcatctttccaaattgatgggtgggctagtaataaaatatttaaaaaaaaacattcaaaaacatggccacatccaacatttcctcaggcaattccttttgattcttttttcttccccctccatgtagaagagggagaaggagaggctctgaaagctgcttctgggggatttcaagggactgggggtgccaaccacctctggccctgttgtgggggtgtcacagaggcagtggcagcaacaaaggatttgaaacttggtgtgttcgtggagccacaggcagacgatgtcaaccttgtgtgagtgtgacgggggttggggtggggcgggaggccacgggggaggccgaggcaggggctgggcagaggggagaggaagcacaagaagtgggagtgggagaggaagccacgtgctggagagtagacatccccctccttgccgctgggagagccaaggcctatgccacctgcagcgtctgagcggccgcctgtccttggtggccgggggtgggggcctgctgtgggtcagtgtgccaccctctgcagggcagcctgtgggagaagggacagcgggtaaaaagagaaggcaagctggcaggagggtggcacttcgtggatgacctccttagaaaagactgaccttgatgtcttgagagcgctggcctcttcctccctccctgcagggtagggggcctgagttgaggggcttccctctgctccacagaaaccctgttttattgagttctgaaggttggaactgctgccatgattttggccactttgcagacctgggactttagggctaaccagttctctttgtaaggacttgtgcctcttgggagacgtccacccgtttccaagcctgggccactggcatctctggagtgtgtgggggtctgggaggcaggtcccgagccccctgtccttcccacggccactgcagtcaccccgtctgcgccgctgtgctgttgtctgccgtgagagcccaatcactgcctatacccctcatcacacgtcacaatgtcccgaattcccagcctcaccaccccttctcagtaatgaccctggttggttgcaggaggtacctactccatactgagggtgaaattaagggaaggcaaagtccaggcacaagagtgggaccccagcctctcactctcagttccactcatccaactgggaccctcaccacgaatctcatgatctgattcggttccctgtctcctcctcccgtcacagatgtgagccagggcactgctcagctgtgaccctaggtgtttctgccttgttgacatggagagagccctttcccctgagaaggcctggccccttcctgtgctgagcccacagcagcaggctgggtgtcttggttgtcagtggtggcaccaggatggaagggcaaggcacccagggcaggcccacagtcccgctgtcccccacttgcaccctagcttgtagctgccaacctcccagacagcccagcccgctgctcagctccacatgcatagtatcagccctccacacccgacaaaggggaacacacccccttggaaatggttcttttcccccagtcccagctggaagccatgctgtctgttctgctggagcagctgaacatatacatagatgttgccctgccctccccatctgcaccctgttgagttgtagttggatttgtctgtttatgcttggattcaccagagtgactatgatagtgaaaagaaaaaaaaaaaaaaaaaaggacgcatgtatcttgaaatgcttgtaaagaggtttctaacccaccctcacgaggtgtctctcacccccacactgggactcgtgtggcctgtgtggtgccaccctgctggggcctcccaagttttgaaaggctttcctcagcacctgggacccaacagagaccagcttctagcagctaaggaggccgttcagctgtgacgaaggcctgaagcacaggattaggactgaagcgatgatgtccccttccctacttccccttggggctccctgtgtcagggcacagactaggtcttgtggctggtctggcttgcggcgcgaggatggttctctctggtcatagcccgaagtctcatggcagtcccaaaggaggcttacaactcctgcatcacaagaaaaaggaagccactgccagctggggggatctgcagctcccagaagctccgtgagcctcagccacccctcagactgggttcctctccaagctcgccctctggaggggcagcgcagcctcccaccaagggccctgcgaccacagcagggattgggatgaattgcctgtcctggatctgctctagaggcccaagctgcctgcctgaggaaggatgacttgacaagtcaggagacactgttcccaaagccttgaccagagcacctcagcccgctgaccttgcacaaactccatctgctgccatgagaaaagggaagccgcctttgcaaaacattgctgcctaaagaaactcagcagcctcaggcccaattctgccacttctggtttgggtacagttaaaggcaaccctgagggacttggcagtagaaatccagggcctcccctggggctggcagcttcgtgtgcagctagagctttacctgaaaggaagtctctgggcccagaactctccaccaagagcctccctgccgttcgctgagtcccagcaattctcctaagttgaagggatctgagaaggagaaggaaatgtggggtagatttggtggtggttagagatatgcccccctcattactgccaacagtttcggctgcatttcttcacgcacctcggttcctcttcctgaagttcttgtgccctgctcttcagcaccatgggccttcttatacggaaggctctgggatctcccccttgtggggcaggctcttggggccagcctaagatcatggtttagggtgatcagtgctggcagataaattgaaaaggcacgctggcttgtgatcttaaatgaggacaatccccccagggctgggcactcctcccctcccctcacttctcccacctgcagagccagtgtccttgggtgggctagataggatatactgtatgccggctccttcaagctgctgactcactttatcaatagttccatttaaattgacttcagtggtgagactgtatcctgtttgctattgcttgttgtgctatggggggaggggggaggaatgtgtaagatagttaacatgggcaaagggagatcttggggtgcagcacttaaactgcctcgtaacccttttcatgatttcaaccacatttgctagagggagggagcagccacggagttagaggcccttggggtttctcttttccactgacaggctttcccaggcagctggctagttcattccctccccagccaggtgcaggcgtaggaatatggacatctggttgctttggcctgctgccctctttcaggggtcctaagcccacaatcatgcctccctaagaccttggcatccttccctctaagccgttggcacctctgtgccacctctcacactggctccagacacacagcctgtgcttttggagctgagatcactcgcttcaccctcctcatctttgttctccaagtaaagccacgaggtcggggcgagggcagaggtgatcacctgcgtgtcccatctacagacctgcagcttcataaaacttctgatttctcttcagctttgaaaagggttaccctgggcactggcctagagcctcacctcctaatagacttagccccatgagtttgccatgttgagcaggactatttctggcacttgcaagtcccatgatttcttcggtaattctgagggtggggggagggacatgaaatcatcttagcttagctttctgtctgtgaatgtctatatagtgtattgtgtgttttaacaaatgatttacactgactgttgctgtaaaagtgaatttggaaataaagttattactctgattaaa

SEQ ID NO: 520 - DNA, 6617 bp, Homo sapiens
  source 1..6617: mol_type = genomic DNA
gcagtcaccgccacccaccagctccggcaccaacagcagcgccgctgccaccgcccaccttctgccgccgccaccacagccaccttctcctcctccgctgtcctctcccgtcctcgcctctgtcgactatcaggtgaactttgaaccaggatggctgagccccgccaggagttcgaagtgatggaagatcacgctgggacgtacgggttgggggacaggaaagatcaggggggctacaccatgcaccaagaccaagagggtgacacggacgctggcctgaaagaatctcccctgcagacccccactgaggacggatctgaggaaccgggctctgaaacctctgatgctaagagcactccaacagcggaagctgaagaagcaggcattggagacacccccagcctggaagacgaagctgctggtcacgtgacccaagaggagttgagagttccgggccggcagaggaaggcgcctgaaaggcccctggccaatgagattagcgcccacgtccagcctggaccctgcggagaggcctctggggtctctgggccgtgcctcggggagaaagagccagaagctcccgtcccgctgaccgcgagccttcctcagcaccgtcccgtttgcccagcgcctcctccaacaggaggccctcaggagccctccctggagtggggacaaaaaggcggggactgggccgagaagggtccggcctttccgaagcccgccaccactgcgtatctccacacagagcctgaaagtggtaaggtggtccaggaaggcttcctccgagagccaggccccccaggtctgagccaccagctcatgtccggcatgcctggggctcccctcctgcctgagggccccagagaggccacacgccaaccttcggggacaggacctgaggacacagagggcggccgccacgcccctgagctgctcaagcaccagcttctaggagacctgcaccaggaggggccgccgctgaagggggcagggggcaaagagaggccggggagcaaggaggaggtggatgaagaccgcgacgtcgatgagtcctccccccaagactcccctccctccaaggcctccccagcccaagatgggcggcctccccagacagccgccagagaagccaccagcatcccaggcttcccagcggagggtgccatccccctccctgtggatttcctctccaaagtttccacagagatcccagcctcagagcccgacgggcccagtgtagggcgggccaaagggcaggatgcccccctggagttcacgtttcacgtggaaatcacacccaacgtgcagaaggagcaggcgcactcggaggagcatttgggaagggctgcatttccaggggcccctggagaggggccagaggcccggggcccctctttgggagaggacacaaaagaggctgaccttccagagccctctgaaaagcagcctgctgctgctccgcgggggaagcccgtcagccgggtccctcaactcaaagctcgcatggtcagtaaaagcaaagacgggactggaagcgatgacaaaaaagccaagggggctgatggtaaaacgaagatcgccacaccgcggggagcagcccctccaggccagaagggccaggccaacgccaccaggattccagcaaaaaccccgcccgctccaaagacaccacccagctctggtgaacctccaaaatcaggggatcgcagcggctacagcagccccggctccccaggcactcccggcagccgctcccgcaccccgtcccttccaaccccacccacccgggagcccaagaaggtggcagtggtccgtactccacccaagtcgccgtcttccgccaagagccgcctgcagacagcccccgtgcccatgccagacctgaagaatgtcaagtccaagatcggctccactgagaacctgaagcaccagccgggaggcgggaaggtgcagataattaataagaagctggatcttagcaacgtccagtccaagtgtggctcaaaggataatatcaaacacgtcccgggaggcggcagtgtgcaaatagtctacaaaccagttgacctgagcaaggtgacctccaagtgtggctcattaggcaacatccatcataaaccaggaggtggccaggtggaagtaaaatctgagaagcttgacttcaaggacagagtccagtcgaagattgggtccctggacaatatcacccacgtccctggcggaggaaataaaaagattgaaacccacaagctgaccttccgcgagaacgccaaagccaagacagaccacggggcggagatcgtgtacaagtcgccagtggtgtctggggacacgtctccacggcatctcagcaatgtctcctccaccggcagcatcgacatggtagactcgccccagctcgccacgctagctgacgaggtgtctgcctccctggccaagcagggtttgtgatcaggcccctggggcggtcaataattgtggagaggagagaatgagagagtgtggaaaaaaaaagaataatgacccggcccccgccctctgcccccagctgctcctcgcagttcggttaattggttaatcacttaacctgcttttgtcactcggctttggctcgggacttcaaaatcagtgatgggagtaagagcaaatttcatctttccaaattgatgggtgggctagtaataaaatatttaaaaaaaaacattcaaaaacatggccacatccaacatttcctcaggcaattccttttgattcttttttcttccccctccatgtagaagagggagaaggagaggctctgaaagctgcttctgggggatttcaagggactgggggtgccaaccacctctggccctgttgtgggggtgtcacagaggcagtggcagcaacaaaggatttgaaacttggtgtgttcgtggagccacaggcagacgatgtcaaccttgtgtgagtgtgacgggggttggggtggggcgggaggccacgggggaggccgaggcaggggctgggcagaggggagaggaagcacaagaagtgggagtgggagaggaagccacgtgctggagagtagacatccccctccttgccgctgggagagccaaggcctatgccacctgcagcgtctgagcggccgcctgtccttggtggccgggggtgggggcctgctgtgggtcagtgtgccaccctctgcagggcagcctgtgggagaagggacagcgggtaaaaagagaaggcaagctggcaggagggtggcacttcgtggatgacctccttagaaaagactgaccttgatgtcttgagagcgctggcctcttcctccctccctgcagggtagggggcctgagttgaggggcttccctctgctccacagaaaccctgttttattgagttctgaaggttggaactgctgccatgattttggccactttgcagacctgggactttagggctaaccagttctctttgtaaggacttgtgcctcttgggagacgtccacccgtttccaagcctgggccactggcatctctggagtgtgtgggggtctgggaggcaggtcccgagccccctgtccttcccacggccactgcagtcaccccgtctgcgccgctgtgctgttgtctgccgtgagagcccaatcactgcctatacccctcatcacacgtcacaatgtcccgaattcccagcctcaccaccccttctcagtaatgaccctggttggttgcaggaggtacctactccatactgagggtgaaattaagggaaggcaaagtccaggcacaagagtgggaccccagcctctcactctcagttccactcatccaactgggaccctcaccacgaatctcatgatctgattcggttccctgtctcctcctcccgtcacagatgtgagccagggcactgctcagctgtgaccctaggtgtttctgccttgttgacatggagagagccctttcccctgagaaggcctggccccttcctgtgctgagcccacagcagcaggctgggtgtcttggttgtcagtggtggcaccaggatggaagggcaaggcacccagggcaggcccacagtcccgctgtcccccacttgcaccctagcttgtagctgccaacctcccagacagcccagcccgctgctcagctccacatgcatagtatcagccctccacacccgacaaaggggaacacacccccttggaaatggttcttttcccccagtcccagctggaagccatgctgtctgttctgctggagcagctgaacatatacatagatgttgccctgccctccccatctgcaccctgttgagttgtagttggatttgtctgtttatgcttggattcaccagagtgactatgatagtgaaaagaaaaaaaaaaaaaaaaaaggacgcatgtatcttgaaatgcttgtaaagaggtttctaacccaccctcacgaggtgtctctcacccccacactgggactcgtgtggcctgtgtggtgccaccctgctggggcctcccaagttttgaaaggctttcctcagcacctgggacccaacagagaccagcttctagcagctaaggaggccgttcagctgtgacgaaggcctgaagcacaggattaggactgaagcgatgatgtccccttccctacttccccttggggctccctgtgtcagggcacagactaggtcttgtggctggtctggcttgcggcgcgaggatggttctctctggtcatagcccgaagtctcatggcagtcccaaaggaggcttacaactcctgcatcacaagaaaaaggaagccactgccagctggggggatctgcagctcccagaagctccgtgagcctcagccacccctcagactgggttcctctccaagctcgccctctggaggggcagcgcagcctcccaccaagggccctgcgaccacagcagggattgggatgaattgcctgtcctggatctgctctagaggcccaagctgcctgcctgaggaaggatgacttgacaagtcaggagacactgttcccaaagccttgaccagagcacctcagcccgctgaccttgcacaaactccatctgctgccatgagaaaagggaagccgcctttgcaaaacattgctgcctaaagaaactcagcagcctcaggcccaattctgccacttctggtttgggtacagttaaaggcaaccctgagggacttggcagtagaaatccagggcctcccctggggctggcagcttcgtgtgcagctagagctttacctgaaaggaagtctctgggcccagaactctccaccaagagcctccctgccgttcgctgagtcccagcaattctcctaagttgaagggatctgagaaggagaaggaaatgtggggtagatttggtggtggttagagatatgcccccctcattactgccaacagtttcggctgcatttcttcacgcacctcggttcctcttcctgaagttcttgtgccctgctcttcagcaccatgggccttcttatacggaaggctctgggatctcccccttgtggggcaggctcttggggccagcctaagatcatggtttagggtgatcagtgctggcagataaattgaaaaggcacgctggcttgtgatcttaaatgaggacaatccccccagggctgggcactcctcccctcccctcacttctcccacctgcagagccagtgtccttgggtgggctagataggatatactgtatgccggctccttcaagctgctgactcactttatcaatagttccatttaaattgacttcagtggtgagactgtatcctgtttgctattgcttgttgtgctatggggggaggggggaggaatgtgtaagatagttaacatgggcaaagggagatcttggggtgcagcacttaaactgcctcgtaacccttttcatgatttcaaccacatttgctagagggagggagcagccacggagttagaggcccttggggtttctcttttccactgacaggctttcccaggcagctggctagttcattccctccccagccaggtgcaggcgtaggaatatggacatctggttgctttggcctgctgccctctttcaggggtcctaagcccacaatcatgcctccctaagaccttggcatccttccctctaagccgttggcacctctgtgccacctctcacactggctccagacacacagcctgtgcttttggagctgagatcactcgcttcaccctcctcatctttgttctccaagtaaagccacgaggtcggggcgagggcagaggtgatcacctgcgtgtcccatctacagacctgcagcttcataaaacttctgatttctcttcagctttgaaaagggttaccctgggcactggcctagagcctcacctcctaatagacttagccccatgagtttgccatgttgagcaggactatttctggcacttgcaagtcccatgatttcttcggtaattctgagggtggggggagggacatgaaatcatcttagcttagctttctgtctgtgaatgtctatatagtgtattgtgtgttttaacaaatgatttacactgactgttgctgtaaaagtgaatttggaaataaagttattactctgattaaa

SEQ ID NO: 521 - DNA, 6524 bp, Homo sapiens
  source 1..6524: mol_type = genomic DNA
gcagtcaccgccacccaccagctccggcaccaacagcagcgccgctgccaccgcccaccttctgccgccgccaccacagccaccttctcctcctccgctgtcctctcccgtcctcgcctctgtcgactatcaggtgaactttgaaccaggatggctgagccccgccaggagttcgaagtgatggaagatcacgctgggacgtacgggttgggggacaggaaagatcaggggggctacaccatgcaccaagaccaagagggtgacacggacgctggcctgaaagaatctcccctgcagacccccactgaggacggatctgaggaaccgggctctgaaacctctgatgctaagagcactccaacagcggaagctgaagaagcaggcattggagacacccccagcctggaagacgaagctgctggtcacgtgacccaagaggagttgagagttccgggccggcagaggaaggcgcctgaaaggcccctggccaatgagattagcgcccacgtccagcctggaccctgcggagaggcctctggggtctctgggccgtgcctcggggagaaagagccagaagctcccgtcccgctgaccgcgagccttcctcagcaccgtcccgtttgcccagcgcctcctccaacaggaggccctcaggagccctccctggagtggggacaaaaaggcggggactgggccgagaagggtccggcctttccgaagcccgccaccactgcgtatctccacacagagcctgaaagtggtaaggtggtccaggaaggcttcctccgagagccaggccccccaggtctgagccaccagctcatgtccggcatgcctggggctcccctcctgcctgagggccccagagaggccacacgccaaccttcggggacaggacctgaggacacagagggcggccgccacgcccctgagctgctcaagcaccagcttctaggagacctgcaccaggaggggccgccgctgaagggggcagggggcaaagagaggccggggagcaaggaggaggtggatgaagaccgcgacgtcgatgagtcctccccccaagactcccctccctccaaggcctccccagcccaagatgggcggcctccccagacagccgccagagaagccaccagcatcccaggcttcccagcggagggtgccatccccctccctgtggatttcctctccaaagtttccacagagatcccagcctcagagcccgacgggcccagtgtagggcgggccaaagggcaggatgcccccctggagttcacgtttcacgtggaaatcacacccaacgtgcagaaggagcaggcgcactcggaggagcatttgggaagggctgcatttccaggggcccctggagaggggccagaggcccggggcccctctttgggagaggacacaaaagaggctgaccttccagagccctctgaaaagcagcctgctgctgctccgcgggggaagcccgtcagccgggtccctcaactcaaagctcgcatggtcagtaaaagcaaagacgggactggaagcgatgacaaaaaagccaagggggctgatggtaaaacgaagatcgccacaccgcggggagcagcccctccaggccagaagggccaggccaacgccaccaggattccagcaaaaaccccgcccgctccaaagacaccacccagctctggtgaacctccaaaatcaggggatcgcagcggctacagcagccccggctccccaggcactcccggcagccgctcccgcaccccgtcccttccaaccccacccacccgggagcccaagaaggtggcagtggtccgtactccacccaagtcgccgtcttccgccaagagccgcctgcagacagcccccgtgcccatgccagacctgaagaatgtcaagtccaagatcggctccactgagaacctgaagcaccagccgggaggcgggaaggtgcaaatagtctacaaaccagttgacctgagcaaggtgacctccaagtgtggctcattaggcaacatccatcataaaccaggaggtggccaggtggaagtaaaatctgagaagcttgacttcaaggacagagtccagtcgaagattgggtccctggacaatatcacccacgtccctggcggaggaaataaaaagattgaaacccacaagctgaccttccgcgagaacgccaaagccaagacagaccacggggcggagatcgtgtacaagtcgccagtggtgtctggggacacgtctccacggcatctcagcaatgtctcctccaccggcagcatcgacatggtagactcgccccagctcgccacgctagctgacgaggtgtctgcctccctggccaagcagggtttgtgatcaggcccctggggcggtcaataattgtggagaggagagaatgagagagtgtggaaaaaaaaagaataatgacccggcccccgccctctgcccccagctgctcctcgcagttcggttaattggttaatcacttaacctgcttttgtcactcggctttggctcgggacttcaaaatcagtgatgggagtaagagcaaatttcatctttccaaattgatgggtgggctagtaataaaatatttaaaaaaaaacattcaaaaacatggccacatccaacatttcctcaggcaattccttttgattcttttttcttccccctccatgtagaagagggagaaggagaggctctgaaagctgcttctgggggatttcaagggactgggggtgccaaccacctctggccctgttgtgggggtgtcacagaggcagtggcagcaacaaaggatttgaaacttggtgtgttcgtggagccacaggcagacgatgtcaaccttgtgtgagtgtgacgggggttggggtggggcgggaggccacgggggaggccgaggcaggggctgggcagaggggagaggaagcacaagaagtgggagtgggagaggaagccacgtgctggagagtagacatccccctccttgccgctgggagagccaaggcctatgccacctgcagcgtctgagcggccgcctgtccttggtggccgggggtgggggcctgctgtgggtcagtgtgccaccctctgcagggcagcctgtgggagaagggacagcgggtaaaaagagaaggcaagctggcaggagggtggcacttcgtggatgacctccttagaaaagactgaccttgatgtcttgagagcgctggcctcttcctccctccctgcagggtagggggcctgagttgaggggcttccctctgctccacagaaaccctgttttattgagttctgaaggttggaactgctgccatgattttggccactttgcagacctgggactttagggctaaccagttctctttgtaaggacttgtgcctcttgggagacgtccacccgtttccaagcctgggccactggcatctctggagtgtgtgggggtctgggaggcaggtcccgagccccctgtccttcccacggccactgcagtcaccccgtctgcgccgctgtgctgttgtctgccgtgagagcccaatcactgcctatacccctcatcacacgtcacaatgtcccgaattcccagcctcaccaccccttctcagtaatgaccctggttggttgcaggaggtacctactccatactgagggtgaaattaagggaaggcaaagtccaggcacaagagtgggaccccagcctctcactctcagttccactcatccaactgggaccctcaccacgaatctcatgatctgattcggttccctgtctcctcctcccgtcacagatgtgagccagggcactgctcagctgtgaccctaggtgtttctgccttgttgacatggagagagccctttcccctgagaaggcctggccccttcctgtgctgagcccacagcagcaggctgggtgtcttggttgtcagtggtggcaccaggatggaagggcaaggcacccagggcaggcccacagtcccgctgtcccccacttgcaccctagcttgtagctgccaacctcccagacagcccagcccgctgctcagctccacatgcatagtatcagccctccacacccgacaaaggggaacacacccccttggaaatggttcttttcccccagtcccagctggaagccatgctgtctgttctgctggagcagctgaacatatacatagatgttgccctgccctccccatctgcaccctgttgagttgtagttggatttgtctgtttatgcttggattcaccagagtgactatgatagtgaaaagaaaaaaaaaaaaaaaaaaggacgcatgtatcttgaaatgcttgtaaagaggtttctaacccaccctcacgaggtgtctctcacccccacactgggactcgtgtggcctgtgtggtgccaccctgctggggcctcccaagttttgaaaggctttcctcagcacctgggacccaacagagaccagcttctagcagctaaggaggccgttcagctgtgacgaaggcctgaagcacaggattaggactgaagcgatgatgtccccttccctacttccccttggggctccctgtgtcagggcacagactaggtcttgtggctggtctggcttgcggcgcgaggatggttctctctggtcatagcccgaagtctcatggcagtcccaaaggaggcttacaactcctgcatcacaagaaaaaggaagccactgccagctggggggatctgcagctcccagaagctccgtgagcctcagccacccctcagactgggttcctctccaagctcgccctctggaggggcagcgcagcctcccaccaagggccctgcgaccacagcagggattgggatgaattgcctgtcctggatctgctctagaggcccaagctgcctgcctgaggaaggatgacttgacaagtcaggagacactgttcccaaagccttgaccagagcacctcagcccgctgaccttgcacaaactccatctgctgccatgagaaaagggaagccgcctttgcaaaacattgctgcctaaagaaactcagcagcctcaggcccaattctgccacttctggtttgggtacagttaaaggcaaccctgagggacttggcagtagaaatccagggcctcccctggggctggcagcttcgtgtgcagctagagctttacctgaaaggaagtctctgggcccagaactctccaccaagagcctccctgccgttcgctgagtcccagcaattctcctaagttgaagggatctgagaaggagaaggaaatgtggggtagatttggtggtggttagagatatgcccccctcattactgccaacagtttcggctgcatttcttcacgcacctcggttcctcttcctgaagttcttgtgccctgctcttcagcaccatgggccttcttatacggaaggctctgggatctcccccttgtggggcaggctcttggggccagcctaagatcatggtttagggtgatcagtgctggcagataaattgaaaaggcacgctggcttgtgatcttaaatgaggacaatccccccagggctgggcactcctcccctcccctcacttctcccacctgcagagccagtgtccttgggtgggctagataggatatactgtatgccggctccttcaagctgctgactcactttatcaatagttccatttaaattgacttcagtggtgagactgtatcctgtttgctattgcttgttgtgctatggggggaggggggaggaatgtgtaagatagttaacatgggcaaagggagatcttggggtgcagcacttaaactgcctcgtaacccttttcatgatttcaaccacatttgctagagggagggagcagccacggagttagaggcccttggggtttctcttttccactgacaggctttcccaggcagctggctagttcattccctccccagccaggtgcaggcgtaggaatatggacatctggttgctttggcctgctgccctctttcaggggtcctaagcccacaatcatgcctccctaagaccttggcatccttccctctaagccgttggcacctctgtgccacctctcacactggctccagacacacagcctgtgcttttggagctgagatcactcgcttcaccctcctcatctttgttctccaagtaaagccacgaggtcggggcgagggcagaggtgatcacctgcgtgtcccatctacagacctgcagcttcataaaacttctgatttctcttcagctttgaaaagggttaccctgggcactggcctagagcctcacctcctaatagacttagccccatgagtttgccatgttgagcaggactatttctggcacttgcaagtcccatgatttcttcggtaattctgagggtggggggagggacatgaaatcatcttagcttagctttctgtctgtgaatgtctatatagtgtattgtgtgttttaacaaatgatttacactgactgttgctgtaaaagtgaatttggaaataaagttattactctgattaaa

SEQ ID NO: 522 - DNA, 5750 bp, Homo sapiens
  source 1..5750: mol_type = genomic DNA
gcagtcaccgccacccaccagctccggcaccaacagcagcgccgctgccaccgcccaccttctgccgccgccaccacagccaccttctcctcctccgctgtcctctcccgtcctcgcctctgtcgactatcaggtgaactttgaaccaggatggctgagccccgccaggagttcgaagtgatggaagatcacgctgggacgtacgggttgggggacaggaaagatcaggggggctacaccatgcaccaagaccaagagggtgacacggacgctggcctgaaagaatctcccctgcagacccccactgaggacggatctgaggaaccgggctctgaaacctctgatgctaagagcactccaacagcggaagctgaagaagcaggcattggagacacccccagcctggaagacgaagctgctggtcacgtgacccaagctcgcatggtcagtaaaagcaaagacgggactggaagcgatgacaaaaaagccaagacatccacacgttcctctgctaaaaccttgaaaaataggccttgccttagccccaaacaccccactcctggtagctcagaccctctgatccaaccctccagccctgctgtgtgcccagagccaccttcctctcctaaatacgtctcttctgtcacttcccgaactggcagttctggagcaaaggagatgaaactcaagggggctgatggtaaaacgaagatcgccacaccgcggggagcagcccctccaggccagaagggccaggccaacgccaccaggattccagcaaaaaccccgcccgctccaaagacaccacccagctctggtgaacctccaaaatcaggggatcgcagcggctacagcagccccggctccccaggcactcccggcagccgctcccgcaccccgtcccttccaaccccacccacccgggagcccaagaaggtggcagtggtccgtactccacccaagtcgccgtcttccgccaagagccgcctgcagacagcccccgtgcccatgccagacctgaagaatgtcaagtccaagatcggctccactgagaacctgaagcaccagccgggaggcgggaaggtgcagataattaataagaagctggatcttagcaacgtccagtccaagtgtggctcaaaggataatatcaaacacgtcccgggaggcggcagtgtgcaaatagtctacaaaccagttgacctgagcaaggtgacctccaagtgtggctcattaggcaacatccatcataaaccaggaggtggccaggtggaagtaaaatctgagaagcttgacttcaaggacagagtccagtcgaagattgggtccctggacaatatcacccacgtccctggcggaggaaataaaaagattgaaacccacaagctgaccttccgcgagaacgccaaagccaagacagaccacggggcggagatcgtgtacaagtcgccagtggtgtctggggacacgtctccacggcatctcagcaatgtctcctccaccggcagcatcgacatggtagactcgccccagctcgccacgctagctgacgaggtgtctgcctccctggccaagcagggtttgtgatcaggcccctggggcggtcaataattgtggagaggagagaatgagagagtgtggaaaaaaaaagaataatgacccggcccccgccctctgcccccagctgctcctcgcagttcggttaattggttaatcacttaacctgcttttgtcactcggctttggctcgggacttcaaaatcagtgatgggagtaagagcaaatttcatctttccaaattgatgggtgggctagtaataaaatatttaaaaaaaaacattcaaaaacatggccacatccaacatttcctcaggcaattccttttgattcttttttcttccccctccatgtagaagagggagaaggagaggctctgaaagctgcttctgggggatttcaagggactgggggtgccaaccacctctggccctgttgtgggggtgtcacagaggcagtggcagcaacaaaggatttgaaacttggtgtgttcgtggagccacaggcagacgatgtcaaccttgtgtgagtgtgacgggggttggggtggggcgggaggccacgggggaggccgaggcaggggctgggcagaggggagaggaagcacaagaagtgggagtgggagaggaagccacgtgctggagagtagacatccccctccttgccgctgggagagccaaggcctatgccacctgcagcgtctgagcggccgcctgtccttggtggccgggggtgggggcctgctgtgggtcagtgtgccaccctctgcagggcagcctgtgggagaagggacagcgggtaaaaagagaaggcaagctggcaggagggtggcacttcgtggatgacctccttagaaaagactgaccttgatgtcttgagagcgctggcctcttcctccctccctgcagggtagggggcctgagttgaggggcttccctctgctccacagaaaccctgttttattgagttctgaaggttggaactgctgccatgattttggccactttgcagacctgggactttagggctaaccagttctctttgtaaggacttgtgcctcttgggagacgtccacccgtttccaagcctgggccactggcatctctggagtgtgtgggggtctgggaggcaggtcccgagccccctgtccttcccacggccactgcagtcaccccgtctgcgccgctgtgctgttgtctgccgtgagagcccaatcactgcctatacccctcatcacacgtcacaatgtcccgaattcccagcctcaccaccccttctcagtaatgaccctggttggttgcaggaggtacctactccatactgagggtgaaattaagggaaggcaaagtccaggcacaagagtgggaccccagcctctcactctcagttccactcatccaactgggaccctcaccacgaatctcatgatctgattcggttccctgtctcctcctcccgtcacagatgtgagccagggcactgctcagctgtgaccctaggtgtttctgccttgttgacatggagagagccctttcccctgagaaggcctggccccttcctgtgctgagcccacagcagcaggctgggtgtcttggttgtcagtggtggcaccaggatggaagggcaaggcacccagggcaggcccacagtcccgctgtcccccacttgcaccctagcttgtagctgccaacctcccagacagcccagcccgctgctcagctccacatgcatagtatcagccctccacacccgacaaaggggaacacacccccttggaaatggttcttttcccccagtcccagctggaagccatgctgtctgttctgctggagcagctgaacatatacatagatgttgccctgccctccccatctgcaccctgttgagttgtagttggatttgtctgtttatgcttggattcaccagagtgactatgatagtgaaaagaaaaaaaaaaaaaaaaaaggacgcatgtatcttgaaatgcttgtaaagaggtttctaacccaccctcacgaggtgtctctcacccccacactgggactcgtgtggcctgtgtggtgccaccctgctggggcctcccaagttttgaaaggctttcctcagcacctgggacccaacagagaccagcttctagcagctaaggaggccgttcagctgtgacgaaggcctgaagcacaggattaggactgaagcgatgatgtccccttccctacttccccttggggctccctgtgtcagggcacagactaggtcttgtggctggtctggcttgcggcgcgaggatggttctctctggtcatagcccgaagtctcatggcagtcccaaaggaggcttacaactcctgcatcacaagaaaaaggaagccactgccagctggggggatctgcagctcccagaagctccgtgagcctcagccacccctcagactgggttcctctccaagctcgccctctggaggggcagcgcagcctcccaccaagggccctgcgaccacagcagggattgggatgaattgcctgtcctggatctgctctagaggcccaagctgcctgcctgaggaaggatgacttgacaagtcaggagacactgttcccaaagccttgaccagagcacctcagcccgctgaccttgcacaaactccatctgctgccatgagaaaagggaagccgcctttgcaaaacattgctgcctaaagaaactcagcagcctcaggcccaattctgccacttctggtttgggtacagttaaaggcaaccctgagggacttggcagtagaaatccagggcctcccctggggctggcagcttcgtgtgcagctagagctttacctgaaaggaagtctctgggcccagaactctccaccaagagcctccctgccgttcgctgagtcccagcaattctcctaagttgaagggatctgagaaggagaaggaaatgtggggtagatttggtggtggttagagatatgcccccctcattactgccaacagtttcggctgcatttcttcacgcacctcggttcctcttcctgaagttcttgtgccctgctcttcagcaccatgggccttcttatacggaaggctctgggatctcccccttgtggggcaggctcttggggccagcctaagatcatggtttagggtgatcagtgctggcagataaattgaaaaggcacgctggcttgtgatcttaaatgaggacaatccccccagggctgggcactcctcccctcccctcacttctcccacctgcagagccagtgtccttgggtgggctagataggatatactgtatgccggctccttcaagctgctgactcactttatcaatagttccatttaaattgacttcagtggtgagactgtatcctgtttgctattgcttgttgtgctatggggggaggggggaggaatgtgtaagatagttaacatgggcaaagggagatcttggggtgcagcacttaaactgcctcgtaacccttttcatgatttcaaccacatttgctagagggagggagcagccacggagttagaggcccttggggtttctcttttccactgacaggctttcccaggcagctggctagttcattccctccccagccaggtgcaggcgtaggaatatggacatctggttgctttggcctgctgccctctttcaggggtcctaagcccacaatcatgcctccctaagaccttggcatccttccctctaagccgttggcacctctgtgccacctctcacactggctccagacacacagcctgtgcttttggagctgagatcactcgcttcaccctcctcatctttgttctccaagtaaagccacgaggtcggggcgagggcagaggtgatcacctgcgtgtcccatctacagacctgcagcttcataaaacttctgatttctcttcagctttgaaaagggttaccctgggcactggcctagagcctcacctcctaatagacttagccccatgagtttgccatgttgagcaggactatttctggcacttgcaagtcccatgatttcttcggtaattctgagggtggggggagggacatgaaatcatcttagcttagctttctgtctgtgaatgtctatatagtgtattgtgtgttttaacaaatgatttacactgactgttgctgtaaaagtgaatttggaaataaagttattactctgattaaa

SEQ ID NO: 523 - DNA, 5657 bp, Homo sapiens
  source 1..5657: mol_type = genomic DNA
gcagtcaccgccacccaccagctccggcaccaacagcagcgccgctgccaccgcccaccttctgccgccgccaccacagccaccttctcctcctccgctgtcctctcccgtcctcgcctctgtcgactatcaggtgaactttgaaccaggatggctgagccccgccaggagttcgaagtgatggaagatcacgctgggacgtacgggttgggggacaggaaagatcaggggggctacaccatgcaccaagaccaagagggtgacacggacgctggcctgaaagaatctcccctgcagacccccactgaggacggatctgaggaaccgggctctgaaacctctgatgctaagagcactccaacagcggaagctgaagaagcaggcattggagacacccccagcctggaagacgaagctgctggtcacgtgacccaagctcgcatggtcagtaaaagcaaagacgggactggaagcgatgacaaaaaagccaagacatccacacgttcctctgctaaaaccttgaaaaataggccttgccttagccccaaacaccccactcctggtagctcagaccctctgatccaaccctccagccctgctgtgtgcccagagccaccttcctctcctaaatacgtctcttctgtcacttcccgaactggcagttctggagcaaaggagatgaaactcaagggggctgatggtaaaacgaagatcgccacaccgcggggagcagcccctccaggccagaagggccaggccaacgccaccaggattccagcaaaaaccccgcccgctccaaagacaccacccagctctggtgaacctccaaaatcaggggatcgcagcggctacagcagccccggctccccaggcactcccggcagccgctcccgcaccccgtcccttccaaccccacccacccgggagcccaagaaggtggcagtggtccgtactccacccaagtcgccgtcttccgccaagagccgcctgcagacagcccccgtgcccatgccagacctgaagaatgtcaagtccaagatcggctccactgagaacctgaagcaccagccgggaggcgggaaggtgcaaatagtctacaaaccagttgacctgagcaaggtgacctccaagtgtggctcattaggcaacatccatcataaaccaggaggtggccaggtggaagtaaaatctgagaagcttgacttcaaggacagagtccagtcgaagattgggtccctggacaatatcacccacgtccctggcggaggaaataaaaagattgaaacccacaagctgaccttccgcgagaacgccaaagccaagacagaccacggggcggagatcgtgtacaagtcgccagtggtgtctggggacacgtctccacggcatctcagcaatgtctcctccaccggcagcatcgacatggtagactcgccccagctcgccacgctagctgacgaggtgtctgcctccctggccaagcagggtttgtgatcaggcccctggggcggtcaataattgtggagaggagagaatgagagagtgtggaaaaaaaaagaataatgacccggcccccgccctctgcccccagctgctcctcgcagttcggttaattggttaatcacttaacctgcttttgtcactcggctttggctcgggacttcaaaatcagtgatgggagtaagagcaaatttcatctttccaaattgatgggtgggctagtaataaaatatttaaaaaaaaacattcaaaaacatggccacatccaacatttcctcaggcaattccttttgattcttttttcttccccctccatgtagaagagggagaaggagaggctctgaaagctgcttctgggggatttcaagggactgggggtgccaaccacctctggccctgttgtgggggtgtcacagaggcagtggcagcaacaaaggatttgaaacttggtgtgttcgtggagccacaggcagacgatgtcaaccttgtgtgagtgtgacgggggttggggtggggcgggaggccacgggggaggccgaggcaggggctgggcagaggggagaggaagcacaagaagtgggagtgggagaggaagccacgtgctggagagtagacatccccctccttgccgctgggagagccaaggcctatgccacctgcagcgtctgagcggccgcctgtccttggtggccgggggtgggggcctgctgtgggtcagtgtgccaccctctgcagggcagcctgtgggagaagggacagcgggtaaaaagagaaggcaagctggcaggagggtggcacttcgtggatgacctccttagaaaagactgaccttgatgtcttgagagcgctggcctcttcctccctccctgcagggtagggggcctgagttgaggggcttccctctgctccacagaaaccctgttttattgagttctgaaggttggaactgctgccatgattttggccactttgcagacctgggactttagggctaaccagttctctttgtaaggacttgtgcctcttgggagacgtccacccgtttccaagcctgggccactggcatctctggagtgtgtgggggtctgggaggcaggtcccgagccccctgtccttcccacggccactgcagtcaccccgtctgcgccgctgtgctgttgtctgccgtgagagcccaatcactgcctatacccctcatcacacgtcacaatgtcccgaattcccagcctcaccaccccttctcagtaatgaccctggttggttgcaggaggtacctactccatactgagggtgaaattaagggaaggcaaagtccaggcacaagagtgggaccccagcctctcactctcagttccactcatccaactgggaccctcaccacgaatctcatgatctgattcggttccctgtctcctcctcccgtcacagatgtgagccagggcactgctcagctgtgaccctaggtgtttctgccttgttgacatggagagagccctttcccctgagaaggcctggccccttcctgtgctgagcccacagcagcaggctgggtgtcttggttgtcagtggtggcaccaggatggaagggcaaggcacccagggcaggcccacagtcccgctgtcccccacttgcaccctagcttgtagctgccaacctcccagacagcccagcccgctgctcagctccacatgcatagtatcagccctccacacccgacaaaggggaacacacccccttggaaatggttcttttcccccagtcccagctggaagccatgctgtctgttctgctggagcagctgaacatatacatagatgttgccctgccctccccatctgcaccctgttgagttgtagttggatttgtctgtttatgcttggattcaccagagtgactatgatagtgaaaagaaaaaaaaaaaaaaaaaaggacgcatgtatcttgaaatgcttgtaaagaggtttctaacccaccctcacgaggtgtctctcacccccacactgggactcgtgtggcctgtgtggtgccaccctgctggggcctcccaagttttgaaaggctttcctcagcacctgggacccaacagagaccagcttctagcagctaaggaggccgttcagctgtgacgaaggcctgaagcacaggattaggactgaagcgatgatgtccccttccctacttccccttggggctccctgtgtcagggcacagactaggtcttgtggctggtctggcttgcggcgcgaggatggttctctctggtcatagcccgaagtctcatggcagtcccaaaggaggcttacaactcctgcatcacaagaaaaaggaagccactgccagctggggggatctgcagctcccagaagctccgtgagcctcagccacccctcagactgggttcctctccaagctcgccctctggaggggcagcgcagcctcccaccaagggccctgcgaccacagcagggattgggatgaattgcctgtcctggatctgctctagaggcccaagctgcctgcctgaggaaggatgacttgacaagtcaggagacactgttcccaaagccttgaccagagcacctcagcccgctgaccttgcacaaactccatctgctgccatgagaaaagggaagccgcctttgcaaaacattgctgcctaaagaaactcagcagcctcaggcccaattctgccacttctggtttgggtacagttaaaggcaaccctgagggacttggcagtagaaatccagggcctcccctggggctggcagcttcgtgtgcagctagagctttacctgaaaggaagtctctgggcccagaactctccaccaagagcctccctgccgttcgctgagtcccagcaattctcctaagttgaagggatctgagaaggagaaggaaatgtggggtagatttggtggtggttagagatatgcccccctcattactgccaacagtttcggctgcatttcttcacgcacctcggttcctcttcctgaagttcttgtgccctgctcttcagcaccatgggccttcttatacggaaggctctgggatctcccccttgtggggcaggctcttggggccagcctaagatcatggtttagggtgatcagtgctggcagataaattgaaaaggcacgctggcttgtgatcttaaatgaggacaatccccccagggctgggcactcctcccctcccctcacttctcccacctgcagagccagtgtccttgggtgggctagataggatatactgtatgccggctccttcaagctgctgactcactttatcaatagttccatttaaattgacttcagtggtgagactgtatcctgtttgctattgcttgttgtgctatggggggaggggggaggaatgtgtaagatagttaacatgggcaaagggagatcttggggtgcagcacttaaactgcctcgtaacccttttcatgatttcaaccacatttgctagagggagggagcagccacggagttagaggcccttggggtttctcttttccactgacaggctttcccaggcagctggctagttcattccctccccagccaggtgcaggcgtaggaatatggacatctggttgctttggcctgctgccctctttcaggggtcctaagcccacaatcatgcctccctaagaccttggcatccttccctctaagccgttggcacctctgtgccacctctcacactggctccagacacacagcctgtgcttttggagctgagatcactcgcttcaccctcctcatctttgttctccaagtaaagccacgaggtcggggcgagggcagaggtgatcacctgcgtgtcccatctacagacctgcagcttcataaaacttctgatttctcttcagctttgaaaagggttaccctgggcactggcctagagcctcacctcctaatagacttagccccatgagtttgccatgttgagcaggactatttctggcacttgcaagtcccatgatttcttcggtaattctgagggtggggggagggacatgaaatcatcttagcttagctttctgtctgtgaatgtctatatagtgtattgtgtgttttaacaaatgatttacactgactgttgctgtaaaagtgaatttggaaataaagttattactctgattaaa

SEQ ID NO: 524 - DNA, 5552 bp, Homo sapiens
  source 1..5552: mol_type = genomic DNA
gcagtcaccgccacccaccagctccggcaccaacagcagcgccgctgccaccgcccaccttctgccgccgccaccacagccaccttctcctcctccgctgtcctctcccgtcctcgcctctgtcgactatcaggtgaactttgaaccaggatggctgagccccgccaggagttcgaagtgatggaagatcacgctgggacgtacgggttgggggacaggaaagatcaggggggctacaccatgcaccaagaccaagagggtgacacggacgctggcctgaaagaatctcccctgcagacccccactgaggacggatctgaggaaccgggctctgaaacctctgatgctaagagcactccaacagcggaagctgaagaagcaggcattggagacacccccagcctggaagacgaagctgctggtcacgtgacccaagctcgcatggtcagtaaaagcaaagacgggactggaagcgatgacaaaaaagccaagggggctgatggtaaaacgaagatcgccacaccgcggggagcagcccctccaggccagaagggccaggccaacgccaccaggattccagcaaaaaccccgcccgctccaaagacaccacccagctctggtgaacctccaaaatcaggggatcgcagcggctacagcagccccggctccccaggcactcccggcagccgctcccgcaccccgtcccttccaaccccacccacccgggagcccaagaaggtggcagtggtccgtactccacccaagtcgccgtcttccgccaagagccgcctgcagacagcccccgtgcccatgccagacctgaagaatgtcaagtccaagatcggctccactgagaacctgaagcaccagccgggaggcgggaaggtgcagataattaataagaagctggatcttagcaacgtccagtccaagtgtggctcaaaggataatatcaaacacgtcccgggaggcggcagtgtgcaaatagtctacaaaccagttgacctgagcaaggtgacctccaagtgtggctcattaggcaacatccatcataaaccaggaggtggccaggtggaagtaaaatctgagaagcttgacttcaaggacagagtccagtcgaagattgggtccctggacaatatcacccacgtccctggcggaggaaataaaaagattgaaacccacaagctgaccttccgcgagaacgccaaagccaagacagaccacggggcggagatcgtgtacaagtcgccagtggtgtctggggacacgtctccacggcatctcagcaatgtctcctccaccggcagcatcgacatggtagactcgccccagctcgccacgctagctgacgaggtgtctgcctccctggccaagcagggtttgtgatcaggcccctggggcggtcaataattgtggagaggagagaatgagagagtgtggaaaaaaaaagaataatgacccggcccccgccctctgcccccagctgctcctcgcagttcggttaattggttaatcacttaacctgcttttgtcactcggctttggctcgggacttcaaaatcagtgatgggagtaagagcaaatttcatctttccaaattgatgggtgggctagtaataaaatatttaaaaaaaaacattcaaaaacatggccacatccaacatttcctcaggcaattccttttgattcttttttcttccccctccatgtagaagagggagaaggagaggctctgaaagctgcttctgggggatttcaagggactgggggtgccaaccacctctggccctgttgtgggggtgtcacagaggcagtggcagcaacaaaggatttgaaacttggtgtgttcgtggagccacaggcagacgatgtcaaccttgtgtgagtgtgacgggggttggggtggggcgggaggccacgggggaggccgaggcaggggctgggcagaggggagaggaagcacaagaagtgggagtgggagaggaagccacgtgctggagagtagacatccccctccttgccgctgggagagccaaggcctatgccacctgcagcgtctgagcggccgcctgtccttggtggccgggggtgggggcctgctgtgggtcagtgtgccaccctctgcagggcagcctgtgggagaagggacagcgggtaaaaagagaaggcaagctggcaggagggtggcacttcgtggatgacctccttagaaaagactgaccttgatgtcttgagagcgctggcctcttcctccctccctgcagggtagggggcctgagttgaggggcttccctctgctccacagaaaccctgttttattgagttctgaaggttggaactgctgccatgattttggccactttgcagacctgggactttagggctaaccagttctctttgtaaggacttgtgcctcttgggagacgtccacccgtttccaagcctgggccactggcatctctggagtgtgtgggggtctgggaggcaggtcccgagccccctgtccttcccacggccactgcagtcaccccgtctgcgccgctgtgctgttgtctgccgtgagagcccaatcactgcctatacccctcatcacacgtcacaatgtcccgaattcccagcctcaccaccccttctcagtaatgaccctggttggttgcaggaggtacctactccatactgagggtgaaattaagggaaggcaaagtccaggcacaagagtgggaccccagcctctcactctcagttccactcatccaactgggaccctcaccacgaatctcatgatctgattcggttccctgtctcctcctcccgtcacagatgtgagccagggcactgctcagctgtgaccctaggtgtttctgccttgttgacatggagagagccctttcccctgagaaggcctggccccttcctgtgctgagcccacagcagcaggctgggtgtcttggttgtcagtggtggcaccaggatggaagggcaaggcacccagggcaggcccacagtcccgctgtcccccacttgcaccctagcttgtagctgccaacctcccagacagcccagcccgctgctcagctccacatgcatagtatcagccctccacacccgacaaaggggaacacacccccttggaaatggttcttttcccccagtcccagctggaagccatgctgtctgttctgctggagcagctgaacatatacatagatgttgccctgccctccccatctgcaccctgttgagttgtagttggatttgtctgtttatgcttggattcaccagagtgactatgatagtgaaaagaaaaaaaaaaaaaaaaaaggacgcatgtatcttgaaatgcttgtaaagaggtttctaacccaccctcacgaggtgtctctcacccccacactgggactcgtgtggcctgtgtggtgccaccctgctggggcctcccaagttttgaaaggctttcctcagcacctgggacccaacagagaccagcttctagcagctaaggaggccgttcagctgtgacgaaggcctgaagcacaggattaggactgaagcgatgatgtccccttccctacttccccttggggctccctgtgtcagggcacagactaggtcttgtggctggtctggcttgcggcgcgaggatggttctctctggtcatagcccgaagtctcatggcagtcccaaaggaggcttacaactcctgcatcacaagaaaaaggaagccactgccagctggggggatctgcagctcccagaagctccgtgagcctcagccacccctcagactgggttcctctccaagctcgccctctggaggggcagcgcagcctcccaccaagggccctgcgaccacagcagggattgggatgaattgcctgtcctggatctgctctagaggcccaagctgcctgcctgaggaaggatgacttgacaagtcaggagacactgttcccaaagccttgaccagagcacctcagcccgctgaccttgcacaaactccatctgctgccatgagaaaagggaagccgcctttgcaaaacattgctgcctaaagaaactcagcagcctcaggcccaattctgccacttctggtttgggtacagttaaaggcaaccctgagggacttggcagtagaaatccagggcctcccctggggctggcagcttcgtgtgcagctagagctttacctgaaaggaagtctctgggcccagaactctccaccaagagcctccctgccgttcgctgagtcccagcaattctcctaagttgaagggatctgagaaggagaaggaaatgtggggtagatttggtggtggttagagatatgcccccctcattactgccaacagtttcggctgcatttcttcacgcacctcggttcctcttcctgaagttcttgtgccctgctcttcagcaccatgggccttcttatacggaaggctctgggatctcccccttgtggggcaggctcttggggccagcctaagatcatggtttagggtgatcagtgctggcagataaattgaaaaggcacgctggcttgtgatcttaaatgaggacaatccccccagggctgggcactcctcccctcccctcacttctcccacctgcagagccagtgtccttgggtgggctagataggatatactgtatgccggctccttcaagctgctgactcactttatcaatagttccatttaaattgacttcagtggtgagactgtatcctgtttgctattgcttgttgtgctatggggggaggggggaggaatgtgtaagatagttaacatgggcaaagggagatcttggggtgcagcacttaaactgcctcgtaacccttttcatgatttcaaccacatttgctagagggagggagcagccacggagttagaggcccttggggtttctcttttccactgacaggctttcccaggcagctggctagttcattccctccccagccaggtgcaggcgtaggaatatggacatctggttgctttggcctgctgccctctttcaggggtcctaagcccacaatcatgcctccctaagaccttggcatccttccctctaagccgttggcacctctgtgccacctctcacactggctccagacacacagcctgtgcttttggagctgagatcactcgcttcaccctcctcatctttgttctccaagtaaagccacgaggtcggggcgagggcagaggtgatcacctgcgtgtcccatctacagacctgcagcttcataaaacttctgatttctcttcagctttgaaaagggttaccctgggcactggcctagagcctcacctcctaatagacttagccccatgagtttgccatgttgagcaggactatttctggcacttgcaagtcccatgatttcttcggtaattctgagggtggggggagggacatgaaatcatcttagcttagctttctgtctgtgaatgtctatatagtgtattgtgtgttttaacaaatgatttacactgactgttgctgtaaaagtgaatttggaaataaagttattactctgattaaa

SEQ ID NO: 525 - DNA, 5459 bp, Homo sapiens
  source 1..5459: mol_type = genomic DNA
gcagtcaccgccacccaccagctccggcaccaacagcagcgccgctgccaccgcccaccttctgccgccgccaccacagccaccttctcctcctccgctgtcctctcccgtcctcgcctctgtcgactatcaggtgaactttgaaccaggatggctgagccccgccaggagttcgaagtgatggaagatcacgctgggacgtacgggttgggggacaggaaagatcaggggggctacaccatgcaccaagaccaagagggtgacacggacgctggcctgaaagaatctcccctgcagacccccactgaggacggatctgaggaaccgggctctgaaacctctgatgctaagagcactccaacagcggaagctgaagaagcaggcattggagacacccccagcctggaagacgaagctgctggtcacgtgacccaagctcgcatggtcagtaaaagcaaagacgggactggaagcgatgacaaaaaagccaagggggctgatggtaaaacgaagatcgccacaccgcggggagcagcccctccaggccagaagggccaggccaacgccaccaggattccagcaaaaaccccgcccgctccaaagacaccacccagctctggtgaacctccaaaatcaggggatcgcagcggctacagcagccccggctccccaggcactcccggcagccgctcccgcaccccgtcccttccaaccccacccacccgggagcccaagaaggtggcagtggtccgtactccacccaagtcgccgtcttccgccaagagccgcctgcagacagcccccgtgcccatgccagacctgaagaatgtcaagtccaagatcggctccactgagaacctgaagcaccagccgggaggcgggaaggtgcaaatagtctacaaaccagttgacctgagcaaggtgacctccaagtgtggctcattaggcaacatccatcataaaccaggaggtggccaggtggaagtaaaatctgagaagcttgacttcaaggacagagtccagtcgaagattgggtccctggacaatatcacccacgtccctggcggaggaaataaaaagattgaaacccacaagctgaccttccgcgagaacgccaaagccaagacagaccacggggcggagatcgtgtacaagtcgccagtggtgtctggggacacgtctccacggcatctcagcaatgtctcctccaccggcagcatcgacatggtagactcgccccagctcgccacgctagctgacgaggtgtctgcctccctggccaagcagggtttgtgatcaggcccctggggcggtcaataattgtggagaggagagaatgagagagtgtggaaaaaaaaagaataatgacccggcccccgccctctgcccccagctgctcctcgcagttcggttaattggttaatcacttaacctgcttttgtcactcggctttggctcgggacttcaaaatcagtgatgggagtaagagcaaatttcatctttccaaattgatgggtgggctagtaataaaatatttaaaaaaaaacattcaaaaacatggccacatccaacatttcctcaggcaattccttttgattcttttttcttccccctccatgtagaagagggagaaggagaggctctgaaagctgcttctgggggatttcaagggactgggggtgccaaccacctctggccctgttgtgggggtgtcacagaggcagtggcagcaacaaaggatttgaaacttggtgtgttcgtggagccacaggcagacgatgtcaaccttgtgtgagtgtgacgggggttggggtggggcgggaggccacgggggaggccgaggcaggggctgggcagaggggagaggaagcacaagaagtgggagtgggagaggaagccacgtgctggagagtagacatccccctccttgccgctgggagagccaaggcctatgccacctgcagcgtctgagcggccgcctgtccttggtggccgggggtgggggcctgctgtgggtcagtgtgccaccctctgcagggcagcctgtgggagaagggacagcgggtaaaaagagaaggcaagctggcaggagggtggcacttcgtggatgacctccttagaaaagactgaccttgatgtcttgagagcgctggcctcttcctccctccctgcagggtagggggcctgagttgaggggcttccctctgctccacagaaaccctgttttattgagttctgaaggttggaactgctgccatgattttggccactttgcagacctgggactttagggctaaccagttctctttgtaaggacttgtgcctcttgggagacgtccacccgtttccaagcctgggccactggcatctctggagtgtgtgggggtctgggaggcaggtcccgagccccctgtccttcccacggccactgcagtcaccccgtctgcgccgctgtgctgttgtctgccgtgagagcccaatcactgcctatacccctcatcacacgtcacaatgtcccgaattcccagcctcaccaccccttctcagtaatgaccctggttggttgcaggaggtacctactccatactgagggtgaaattaagggaaggcaaagtccaggcacaagagtgggaccccagcctctcactctcagttccactcatccaactgggaccctcaccacgaatctcatgatctgattcggttccctgtctcctcctcccgtcacagatgtgagccagggcactgctcagctgtgaccctaggtgtttctgccttgttgacatggagagagccctttcccctgagaaggcctggccccttcctgtgctgagcccacagcagcaggctgggtgtcttggttgtcagtggtggcaccaggatggaagggcaaggcacccagggcaggcccacagtcccgctgtcccccacttgcaccctagcttgtagctgccaacctcccagacagcccagcccgctgctcagctccacatgcatagtatcagccctccacacccgacaaaggggaacacacccccttggaaatggttcttttcccccagtcccagctggaagccatgctgtctgttctgctggagcagctgaacatatacatagatgttgccctgccctccccatctgcaccctgttgagttgtagttggatttgtctgtttatgcttggattcaccagagtgactatgatagtgaaaagaaaaaaaaaaaaaaaaaaggacgcatgtatcttgaaatgcttgtaaagaggtttctaacccaccctcacgaggtgtctctcacccccacactgggactcgtgtggcctgtgtggtgccaccctgctggggcctcccaagttttgaaaggctttcctcagcacctgggacccaacagagaccagcttctagcagctaaggaggccgttcagctgtgacgaaggcctgaagcacaggattaggactgaagcgatgatgtccccttccctacttccccttggggctccctgtgtcagggcacagactaggtcttgtggctggtctggcttgcggcgcgaggatggttctctctggtcatagcccgaagtctcatggcagtcccaaaggaggcttacaactcctgcatcacaagaaaaaggaagccactgccagctggggggatctgcagctcccagaagctccgtgagcctcagccacccctcagactgggttcctctccaagctcgccctctggaggggcagcgcagcctcccaccaagggccctgcgaccacagcagggattgggatgaattgcctgtcctggatctgctctagaggcccaagctgcctgcctgaggaaggatgacttgacaagtcaggagacactgttcccaaagccttgaccagagcacctcagcccgctgaccttgcacaaactccatctgctgccatgagaaaagggaagccgcctttgcaaaacattgctgcctaaagaaactcagcagcctcaggcccaattctgccacttctggtttgggtacagttaaaggcaaccctgagggacttggcagtagaaatccagggcctcccctggggctggcagcttcgtgtgcagctagagctttacctgaaaggaagtctctgggcccagaactctccaccaagagcctccctgccgttcgctgagtcccagcaattctcctaagttgaagggatctgagaaggagaaggaaatgtggggtagatttggtggtggttagagatatgcccccctcattactgccaacagtttcggctgcatttcttcacgcacctcggttcctcttcctgaagttcttgtgccctgctcttcagcaccatgggccttcttatacggaaggctctgggatctcccccttgtggggcaggctcttggggccagcctaagatcatggtttagggtgatcagtgctggcagataaattgaaaaggcacgctggcttgtgatcttaaatgaggacaatccccccagggctgggcactcctcccctcccctcacttctcccacctgcagagccagtgtccttgggtgggctagataggatatactgtatgccggctccttcaagctgctgactcactttatcaatagttccatttaaattgacttcagtggtgagactgtatcctgtttgctattgcttgttgtgctatggggggaggggggaggaatgtgtaagatagttaacatgggcaaagggagatcttggggtgcagcacttaaactgcctcgtaacccttttcatgatttcaaccacatttgctagagggagggagcagccacggagttagaggcccttggggtttctcttttccactgacaggctttcccaggcagctggctagttcattccctccccagccaggtgcaggcgtaggaatatggacatctggttgctttggcctgctgccctctttcaggggtcctaagcccacaatcatgcctccctaagaccttggcatccttccctctaagccgttggcacctctgtgccacctctcacactggctccagacacacagcctgtgcttttggagctgagatcactcgcttcaccctcctcatctttgttctccaagtaaagccacgaggtcggggcgagggcagaggtgatcacctgcgtgtcccatctacagacctgcagcttcataaaacttctgatttctcttcagctttgaaaagggttaccctgggcactggcctagagcctcacctcctaatagacttagccccatgagtttgccatgttgagcaggactatttctggcacttgcaagtcccatgatttcttcggtaattctgagggtggggggagggacatgaaatcatcttagcttagctttctgtctgtgaatgtctatatagtgtattgtgtgttttaacaaatgatttacactgactgttgctgtaaaagtgaatttggaaataaagttattactctgattaaa

SEQ ID NO: 526 - DNA, 4139 bp, Homo sapiens
  source 1..4139: mol_type = genomic DNA
gcagtcaccgccacccaccagctccggcaccaacagcagcgccgctgccaccgcccaccttctgccgccgccaccacagccaccttctcctcctccgctgtcctctcccgtcctcgcctctgtcgactatcaggtgaactttgaaccaggatggctgagccccgccaggagttcgaagtgatggaagatcacgctgggacgtacgggttgggggacaggaaagatcaggggggctacaccatgcaccaagaccaagagggtgacacggacgctggcctgaaagaatctcccctgcagacccccactgaggacggatctgaggaaccgggctctgaaacctctgatgctaagagcactccaacagcggaagctgaagaagcaggcattggagacacccccagcctggaagacgaagctgctggtcacgtgacccaagctcgcatggtcagtaaaagcaaagacgggactggaagcgatgacaaaaaagccaagggggctgatggtaaaacgaagatcgccacaccgcggggagcagcccctccaggccagaagggccaggccaacgccaccaggattccagcaaaaaccccgcccgctccaaagacaccacccagctctggtgaacctccaaaatcaggggatcgcagcggctacagcagccccggctccccaggcactcccggcagccgctcccgcaccccgtcccttccaaccccacccacccgggagcccaagaaggtggcagtggtccgtactccacccaagtcgccgtcttccgccaagagccgcctgcagacagcccccgtgcccatgccagacctgaagaatgtcaagtccaagatcggctccactgagaacctgaagcaccagccgggaggcgggaaggtgcaaatagtctacaaaccagttgacctgagcaaggttggaactgctgccatgattttggccactttgcagacctgggactttagggctaaccagttctctttgtaaggacttgtgcctcttgggagacgtccacccgtttccaagcctgggccactggcatctctggagtgtgtgggggtctgggaggcaggtcccgagccccctgtccttcccacggccactgcagtcaccccgtctgcgccgctgtgctgttgtctgccgtgagagcccaatcactgcctatacccctcatcacacgtcacaatgtcccgaattcccagcctcaccaccccttctcagtaatgaccctggttggttgcaggaggtacctactccatactgagggtgaaattaagggaaggcaaagtccaggcacaagagtgggaccccagcctctcactctcagttccactcatccaactgggaccctcaccacgaatctcatgatctgattcggttccctgtctcctcctcccgtcacagatgtgagccagggcactgctcagctgtgaccctaggtgtttctgccttgttgacatggagagagccctttcccctgagaaggcctggccccttcctgtgctgagcccacagcagcaggctgggtgtcttggttgtcagtggtggcaccaggatggaagggcaaggcacccagggcaggcccacagtcccgctgtcccccacttgcaccctagcttgtagctgccaacctcccagacagcccagcccgctgctcagctccacatgcatagtatcagccctccacacccgacaaaggggaacacacccccttggaaatggttcttttcccccagtcccagctggaagccatgctgtctgttctgctggagcagctgaacatatacatagatgttgccctgccctccccatctgcaccctgttgagttgtagttggatttgtctgtttatgcttggattcaccagagtgactatgatagtgaaaagaaaaaaaaaaaaaaaaaaggacgcatgtatcttgaaatgcttgtaaagaggtttctaacccaccctcacgaggtgtctctcacccccacactgggactcgtgtggcctgtgtggtgccaccctgctggggcctcccaagttttgaaaggctttcctcagcacctgggacccaacagagaccagcttctagcagctaaggaggccgttcagctgtgacgaaggcctgaagcacaggattaggactgaagcgatgatgtccccttccctacttccccttggggctccctgtgtcagggcacagactaggtcttgtggctggtctggcttgcggcgcgaggatggttctctctggtcatagcccgaagtctcatggcagtcccaaaggaggcttacaactcctgcatcacaagaaaaaggaagccactgccagctggggggatctgcagctcccagaagctccgtgagcctcagccacccctcagactgggttcctctccaagctcgccctctggaggggcagcgcagcctcccaccaagggccctgcgaccacagcagggattgggatgaattgcctgtcctggatctgctctagaggcccaagctgcctgcctgaggaaggatgacttgacaagtcaggagacactgttcccaaagccttgaccagagcacctcagcccgctgaccttgcacaaactccatctgctgccatgagaaaagggaagccgcctttgcaaaacattgctgcctaaagaaactcagcagcctcaggcccaattctgccacttctggtttgggtacagttaaaggcaaccctgagggacttggcagtagaaatccagggcctcccctggggctggcagcttcgtgtgcagctagagctttacctgaaaggaagtctctgggcccagaactctccaccaagagcctccctgccgttcgctgagtcccagcaattctcctaagttgaagggatctgagaaggagaaggaaatgtggggtagatttggtggtggttagagatatgcccccctcattactgccaacagtttcggctgcatttcttcacgcacctcggttcctcttcctgaagttcttgtgccctgctcttcagcaccatgggccttcttatacggaaggctctgggatctcccccttgtggggcaggctcttggggccagcctaagatcatggtttagggtgatcagtgctggcagataaattgaaaaggcacgctggcttgtgatcttaaatgaggacaatccccccagggctgggcactcctcccctcccctcacttctcccacctgcagagccagtgtccttgggtgggctagataggatatactgtatgccggctccttcaagctgctgactcactttatcaatagttccatttaaattgacttcagtggtgagactgtatcctgtttgctattgcttgttgtgctatggggggaggggggaggaatgtgtaagatagttaacatgggcaaagggagatcttggggtgcagcacttaaactgcctcgtaacccttttcatgatttcaaccacatttgctagagggagggagcagccacggagttagaggcccttggggtttctcttttccactgacaggctttcccaggcagctggctagttcattccctccccagccaggtgcaggcgtaggaatatggacatctggttgctttggcctgctgccctctttcaggggtcctaagcccacaatcatgcctccctaagaccttggcatccttccctctaagccgttggcacctctgtgccacctctcacactggctccagacacacagcctgtgcttttggagctgagatcactcgcttcaccctcctcatctttgttctccaagtaaagccacgaggtcggggcgagggcagaggtgatcacctgcgtgtcccatctacagacctgcagcttcataaaacttctgatttctcttcagctttgaaaagggttaccctgggcactggcctagagcctcacctcctaatagacttagccccatgagtttgccatgttgagcaggactatttctggcacttgcaagtcccatgatttcttcggtaattctgagggtggggggagggacatgaaatcatcttagcttagctttctgtctgtgaatgtctatatagtgtattgtgtgttttaacaaatgatttacactgactgttgctgtaaaagtgaatttggaaataaagttattactctgattaaa

SEQ ID NO: 527 - DNA, 6728 bp, Homo sapiens
  source 1..6728: mol_type = genomic DNA
gcagtcaccgccacccaccagctccggcaccaacagcagcgccgctgccaccgcccaccttctgccgccgccaccacagccaccttctcctcctccgctgtcctctcccgtcctcgcctctgtcgactatcaggtgaactttgaaccaggatggctgagccccgccaggagttcgaagtgatggaagatcacgctgggacgtacgggttgggggacaggaaagatcaggggggctacaccatgcaccaagaccaagagggtgacacggacgctggcctgaaagctgaagaagcaggcattggagacacccccagcctggaagacgaagctgctggtcacgtgacccaagaggagttgagagttccgggccggcagaggaaggcgcctgaaaggcccctggccaatgagattagcgcccacgtccagcctggaccctgcggagaggcctctggggtctctgggccgtgcctcggggagaaagagccagaagctcccgtcccgctgaccgcgagccttcctcagcaccgtcccgtttgcccagcgcctcctccaacaggaggccctcaggagccctccctggagtggggacaaaaaggcggggactgggccgagaagggtccggcctttccgaagcccgccaccactgcgtatctccacacagagcctgaaagtggtaaggtggtccaggaaggcttcctccgagagccaggccccccaggtctgagccaccagctcatgtccggcatgcctggggctcccctcctgcctgagggccccagagaggccacacgccaaccttcggggacaggacctgaggacacagagggcggccgccacgcccctgagctgctcaagcaccagcttctaggagacctgcaccaggaggggccgccgctgaagggggcagggggcaaagagaggccggggagcaaggaggaggtggatgaagaccgcgacgtcgatgagtcctccccccaagactcccctccctccaaggcctccccagcccaagatgggcggcctccccagacagccgccagagaagccaccagcatcccaggcttcccagcggagggtgccatccccctccctgtggatttcctctccaaagtttccacagagatcccagcctcagagcccgacgggcccagtgtagggcgggccaaagggcaggatgcccccctggagttcacgtttcacgtggaaatcacacccaacgtgcagaaggagcaggcgcactcggaggagcatttgggaagggctgcatttccaggggcccctggagaggggccagaggcccggggcccctctttgggagaggacacaaaagaggctgaccttccagagccctctgaaaagcagcctgctgctgctccgcgggggaagcccgtcagccgggtccctcaactcaaagctcgcatggtcagtaaaagcaaagacgggactggaagcgatgacaaaaaagccaagacatccacacgttcctctgctaaaaccttgaaaaataggccttgccttagccccaaacaccccactcctggtagctcagaccctctgatccaaccctccagccctgctgtgtgcccagagccaccttcctctcctaaatacgtctcttctgtcacttcccgaactggcagttctggagcaaaggagatgaaactcaagggggctgatggtaaaacgaagatcgccacaccgcggggagcagcccctccaggccagaagggccaggccaacgccaccaggattccagcaaaaaccccgcccgctccaaagacaccacccagctctggtgaacctccaaaatcaggggatcgcagcggctacagcagccccggctccccaggcactcccggcagccgctcccgcaccccgtcccttccaaccccacccacccgggagcccaagaaggtggcagtggtccgtactccacccaagtcgccgtcttccgccaagagccgcctgcagacagcccccgtgcccatgccagacctgaagaatgtcaagtccaagatcggctccactgagaacctgaagcaccagccgggaggcgggaaggtgcagataattaataagaagctggatcttagcaacgtccagtccaagtgtggctcaaaggataatatcaaacacgtcccgggaggcggcagtgtgcaaatagtctacaaaccagttgacctgagcaaggtgacctccaagtgtggctcattaggcaacatccatcataaaccaggaggtggccaggtggaagtaaaatctgagaagcttgacttcaaggacagagtccagtcgaagattgggtccctggacaatatcacccacgtccctggcggaggaaataaaaagattgaaacccacaagctgaccttccgcgagaacgccaaagccaagacagaccacggggcggagatcgtgtacaagtcgccagtggtgtctggggacacgtctccacggcatctcagcaatgtctcctccaccggcagcatcgacatggtagactcgccccagctcgccacgctagctgacgaggtgtctgcctccctggccaagcagggtttgtgatcaggcccctggggcggtcaataattgtggagaggagagaatgagagagtgtggaaaaaaaaagaataatgacccggcccccgccctctgcccccagctgctcctcgcagttcggttaattggttaatcacttaacctgcttttgtcactcggctttggctcgggacttcaaaatcagtgatgggagtaagagcaaatttcatctttccaaattgatgggtgggctagtaataaaatatttaaaaaaaaacattcaaaaacatggccacatccaacatttcctcaggcaattccttttgattcttttttcttccccctccatgtagaagagggagaaggagaggctctgaaagctgcttctgggggatttcaagggactgggggtgccaaccacctctggccctgttgtgggggtgtcacagaggcagtggcagcaacaaaggatttgaaacttggtgtgttcgtggagccacaggcagacgatgtcaaccttgtgtgagtgtgacgggggttggggtggggcgggaggccacgggggaggccgaggcaggggctgggcagaggggagaggaagcacaagaagtgggagtgggagaggaagccacgtgctggagagtagacatccccctccttgccgctgggagagccaaggcctatgccacctgcagcgtctgagcggccgcctgtccttggtggccgggggtgggggcctgctgtgggtcagtgtgccaccctctgcagggcagcctgtgggagaagggacagcgggtaaaaagagaaggcaagctggcaggagggtggcacttcgtggatgacctccttagaaaagactgaccttgatgtcttgagagcgctggcctcttcctccctccctgcagggtagggggcctgagttgaggggcttccctctgctccacagaaaccctgttttattgagttctgaaggttggaactgctgccatgattttggccactttgcagacctgggactttagggctaaccagttctctttgtaaggacttgtgcctcttgggagacgtccacccgtttccaagcctgggccactggcatctctggagtgtgtgggggtctgggaggcaggtcccgagccccctgtccttcccacggccactgcagtcaccccgtctgcgccgctgtgctgttgtctgccgtgagagcccaatcactgcctatacccctcatcacacgtcacaatgtcccgaattcccagcctcaccaccccttctcagtaatgaccctggttggttgcaggaggtacctactccatactgagggtgaaattaagggaaggcaaagtccaggcacaagagtgggaccccagcctctcactctcagttccactcatccaactgggaccctcaccacgaatctcatgatctgattcggttccctgtctcctcctcccgtcacagatgtgagccagggcactgctcagctgtgaccctaggtgtttctgccttgttgacatggagagagccctttcccctgagaaggcctggccccttcctgtgctgagcccacagcagcaggctgggtgtcttggttgtcagtggtggcaccaggatggaagggcaaggcacccagggcaggcccacagtcccgctgtcccccacttgcaccctagcttgtagctgccaacctcccagacagcccagcccgctgctcagctccacatgcatagtatcagccctccacacccgacaaaggggaacacacccccttggaaatggttcttttcccccagtcccagctggaagccatgctgtctgttctgctggagcagctgaacatatacatagatgttgccctgccctccccatctgcaccctgttgagttgtagttggatttgtctgtttatgcttggattcaccagagtgactatgatagtgaaaagaaaaaaaaaaaaaaaaaaggacgcatgtatcttgaaatgcttgtaaagaggtttctaacccaccctcacgaggtgtctctcacccccacactgggactcgtgtggcctgtgtggtgccaccctgctggggcctcccaagttttgaaaggctttcctcagcacctgggacccaacagagaccagcttctagcagctaaggaggccgttcagctgtgacgaaggcctgaagcacaggattaggactgaagcgatgatgtccccttccctacttccccttggggctccctgtgtcagggcacagactaggtcttgtggctggtctggcttgcggcgcgaggatggttctctctggtcatagcccgaagtctcatggcagtcccaaaggaggcttacaactcctgcatcacaagaaaaaggaagccactgccagctggggggatctgcagctcccagaagctccgtgagcctcagccacccctcagactgggttcctctccaagctcgccctctggaggggcagcgcagcctcccaccaagggccctgcgaccacagcagggattgggatgaattgcctgtcctggatctgctctagaggcccaagctgcctgcctgaggaaggatgacttgacaagtcaggagacactgttcccaaagccttgaccagagcacctcagcccgctgaccttgcacaaactccatctgctgccatgagaaaagggaagccgcctttgcaaaacattgctgcctaaagaaactcagcagcctcaggcccaattctgccacttctggtttgggtacagttaaaggcaaccctgagggacttggcagtagaaatccagggcctcccctggggctggcagcttcgtgtgcagctagagctttacctgaaaggaagtctctgggcccagaactctccaccaagagcctccctgccgttcgctgagtcccagcaattctcctaagttgaagggatctgagaaggagaaggaaatgtggggtagatttggtggtggttagagatatgcccccctcattactgccaacagtttcggctgcatttcttcacgcacctcggttcctcttcctgaagttcttgtgccctgctcttcagcaccatgggccttcttatacggaaggctctgggatctcccccttgtggggcaggctcttggggccagcctaagatcatggtttagggtgatcagtgctggcagataaattgaaaaggcacgctggcttgtgatcttaaatgaggacaatccccccagggctgggcactcctcccctcccctcacttctcccacctgcagagccagtgtccttgggtgggctagataggatatactgtatgccggctccttcaagctgctgactcactttatcaatagttccatttaaattgacttcagtggtgagactgtatcctgtttgctattgcttgttgtgctatggggggaggggggaggaatgtgtaagatagttaacatgggcaaagggagatcttggggtgcagcacttaaactgcctcgtaacccttttcatgatttcaaccacatttgctagagggagggagcagccacggagttagaggcccttggggtttctcttttccactgacaggctttcccaggcagctggctagttcattccctccccagccaggtgcaggcgtaggaatatggacatctggttgctttggcctgctgccctctttcaggggtcctaagcccacaatcatgcctccctaagaccttggcatccttccctctaagccgttggcacctctgtgccacctctcacactggctccagacacacagcctgtgcttttggagctgagatcactcgcttcaccctcctcatctttgttctccaagtaaagccacgaggtcggggcgagggcagaggtgatcacctgcgtgtcccatctacagacctgcagcttcataaaacttctgatttctcttcagctttgaaaagggttaccctgggcactggcctagagcctcacctcctaatagacttagccccatgagtttgccatgttgagcaggactatttctggcacttgcaagtcccatgatttcttcggtaattctgagggtggggggagggacatgaaatcatcttagcttagctttctgtctgtgaatgtctatatagtgtattgtgtgttttaacaaatgatttacactgactgttgctgtaaaagtgaatttggaaataaagttattactctgattaaa

SEQ ID NO: 528 - DNA, 6635 bp, Homo sapiens
  source 1..6635: mol_type = genomic DNA
gcagtcaccgccacccaccagctccggcaccaacagcagcgccgctgccaccgcccaccttctgccgccgccaccacagccaccttctcctcctccgctgtcctctcccgtcctcgcctctgtcgactatcaggtgaactttgaaccaggatggctgagccccgccaggagttcgaagtgatggaagatcacgctgggacgtacgggttgggggacaggaaagatcaggggggctacaccatgcaccaagaccaagagggtgacacggacgctggcctgaaagctgaagaagcaggcattggagacacccccagcctggaagacgaagctgctggtcacgtgacccaagaggagttgagagttccgggccggcagaggaaggcgcctgaaaggcccctggccaatgagattagcgcccacgtccagcctggaccctgcggagaggcctctggggtctctgggccgtgcctcggggagaaagagccagaagctcccgtcccgctgaccgcgagccttcctcagcaccgtcccgtttgcccagcgcctcctccaacaggaggccctcaggagccctccctggagtggggacaaaaaggcggggactgggccgagaagggtccggcctttccgaagcccgccaccactgcgtatctccacacagagcctgaaagtggtaaggtggtccaggaaggcttcctccgagagccaggccccccaggtctgagccaccagctcatgtccggcatgcctggggctcccctcctgcctgagggccccagagaggccacacgccaaccttcggggacaggacctgaggacacagagggcggccgccacgcccctgagctgctcaagcaccagcttctaggagacctgcaccaggaggggccgccgctgaagggggcagggggcaaagagaggccggggagcaaggaggaggtggatgaagaccgcgacgtcgatgagtcctccccccaagactcccctccctccaaggcctccccagcccaagatgggcggcctccccagacagccgccagagaagccaccagcatcccaggcttcccagcggagggtgccatccccctccctgtggatttcctctccaaagtttccacagagatcccagcctcagagcccgacgggcccagtgtagggcgggccaaagggcaggatgcccccctggagttcacgtttcacgtggaaatcacacccaacgtgcagaaggagcaggcgcactcggaggagcatttgggaagggctgcatttccaggggcccctggagaggggccagaggcccggggcccctctttgggagaggacacaaaagaggctgaccttccagagccctctgaaaagcagcctgctgctgctccgcgggggaagcccgtcagccgggtccctcaactcaaagctcgcatggtcagtaaaagcaaagacgggactggaagcgatgacaaaaaagccaagacatccacacgttcctctgctaaaaccttgaaaaataggccttgccttagccccaaacaccccactcctggtagctcagaccctctgatccaaccctccagccctgctgtgtgcccagagccaccttcctctcctaaatacgtctcttctgtcacttcccgaactggcagttctggagcaaaggagatgaaactcaagggggctgatggtaaaacgaagatcgccacaccgcggggagcagcccctccaggccagaagggccaggccaacgccaccaggattccagcaaaaaccccgcccgctccaaagacaccacccagctctggtgaacctccaaaatcaggggatcgcagcggctacagcagccccggctccccaggcactcccggcagccgctcccgcaccccgtcccttccaaccccacccacccgggagcccaagaaggtggcagtggtccgtactccacccaagtcgccgtcttccgccaagagccgcctgcagacagcccccgtgcccatgccagacctgaagaatgtcaagtccaagatcggctccactgagaacctgaagcaccagccgggaggcgggaaggtgcaaatagtctacaaaccagttgacctgagcaaggtgacctccaagtgtggctcattaggcaacatccatcataaaccaggaggtggccaggtggaagtaaaatctgagaagcttgacttcaaggacagagtccagtcgaagattgggtccctggacaatatcacccacgtccctggcggaggaaataaaaagattgaaacccacaagctgaccttccgcgagaacgccaaagccaagacagaccacggggcggagatcgtgtacaagtcgccagtggtgtctggggacacgtctccacggcatctcagcaatgtctcctccaccggcagcatcgacatggtagactcgccccagctcgccacgctagctgacgaggtgtctgcctccctggccaagcagggtttgtgatcaggcccctggggcggtcaataattgtggagaggagagaatgagagagtgtggaaaaaaaaagaataatgacccggcccccgccctctgcccccagctgctcctcgcagttcggttaattggttaatcacttaacctgcttttgtcactcggctttggctcgggacttcaaaatcagtgatgggagtaagagcaaatttcatctttccaaattgatgggtgggctagtaataaaatatttaaaaaaaaacattcaaaaacatggccacatccaacatttcctcaggcaattccttttgattcttttttcttccccctccatgtagaagagggagaaggagaggctctgaaagctgcttctgggggatttcaagggactgggggtgccaaccacctctggccctgttgtgggggtgtcacagaggcagtggcagcaacaaaggatttgaaacttggtgtgttcgtggagccacaggcagacgatgtcaaccttgtgtgagtgtgacgggggttggggtggggcgggaggccacgggggaggccgaggcaggggctgggcagaggggagaggaagcacaagaagtgggagtgggagaggaagccacgtgctggagagtagacatccccctccttgccgctgggagagccaaggcctatgccacctgcagcgtctgagcggccgcctgtccttggtggccgggggtgggggcctgctgtgggtcagtgtgccaccctctgcagggcagcctgtgggagaagggacagcgggtaaaaagagaaggcaagctggcaggagggtggcacttcgtggatgacctccttagaaaagactgaccttgatgtcttgagagcgctggcctcttcctccctccctgcagggtagggggcctgagttgaggggcttccctctgctccacagaaaccctgttttattgagttctgaaggttggaactgctgccatgattttggccactttgcagacctgggactttagggctaaccagttctctttgtaaggacttgtgcctcttgggagacgtccacccgtttccaagcctgggccactggcatctctggagtgtgtgggggtctgggaggcaggtcccgagccccctgtccttcccacggccactgcagtcaccccgtctgcgccgctgtgctgttgtctgccgtgagagcccaatcactgcctatacccctcatcacacgtcacaatgtcccgaattcccagcctcaccaccccttctcagtaatgaccctggttggttgcaggaggtacctactccatactgagggtgaaattaagggaaggcaaagtccaggcacaagagtgggaccccagcctctcactctcagttccactcatccaactgggaccctcaccacgaatctcatgatctgattcggttccctgtctcctcctcccgtcacagatgtgagccagggcactgctcagctgtgaccctaggtgtttctgccttgttgacatggagagagccctttcccctgagaaggcctggccccttcctgtgctgagcccacagcagcaggctgggtgtcttggttgtcagtggtggcaccaggatggaagggcaaggcacccagggcaggcccacagtcccgctgtcccccacttgcaccctagcttgtagctgccaacctcccagacagcccagcccgctgctcagctccacatgcatagtatcagccctccacacccgacaaaggggaacacacccccttggaaatggttcttttcccccagtcccagctggaagccatgctgtctgttctgctggagcagctgaacatatacatagatgttgccctgccctccccatctgcaccctgttgagttgtagttggatttgtctgtttatgcttggattcaccagagtgactatgatagtgaaaagaaaaaaaaaaaaaaaaaaggacgcatgtatcttgaaatgcttgtaaagaggtttctaacccaccctcacgaggtgtctctcacccccacactgggactcgtgtggcctgtgtggtgccaccctgctggggcctcccaagttttgaaaggctttcctcagcacctgggacccaacagagaccagcttctagcagctaaggaggccgttcagctgtgacgaaggcctgaagcacaggattaggactgaagcgatgatgtccccttccctacttccccttggggctccctgtgtcagggcacagactaggtcttgtggctggtctggcttgcggcgcgaggatggttctctctggtcatagcccgaagtctcatggcagtcccaaaggaggcttacaactcctgcatcacaagaaaaaggaagccactgccagctggggggatctgcagctcccagaagctccgtgagcctcagccacccctcagactgggttcctctccaagctcgccctctggaggggcagcgcagcctcccaccaagggccctgcgaccacagcagggattgggatgaattgcctgtcctggatctgctctagaggcccaagctgcctgcctgaggaaggatgacttgacaagtcaggagacactgttcccaaagccttgaccagagcacctcagcccgctgaccttgcacaaactccatctgctgccatgagaaaagggaagccgcctttgcaaaacattgctgcctaaagaaactcagcagcctcaggcccaattctgccacttctggtttgggtacagttaaaggcaaccctgagggacttggcagtagaaatccagggcctcccctggggctggcagcttcgtgtgcagctagagctttacctgaaaggaagtctctgggcccagaactctccaccaagagcctccctgccgttcgctgagtcccagcaattctcctaagttgaagggatctgagaaggagaaggaaatgtggggtagatttggtggtggttagagatatgcccccctcattactgccaacagtttcggctgcatttcttcacgcacctcggttcctcttcctgaagttcttgtgccctgctcttcagcaccatgggccttcttatacggaaggctctgggatctcccccttgtggggcaggctcttggggccagcctaagatcatggtttagggtgatcagtgctggcagataaattgaaaaggcacgctggcttgtgatcttaaatgaggacaatccccccagggctgggcactcctcccctcccctcacttctcccacctgcagagccagtgtccttgggtgggctagataggatatactgtatgccggctccttcaagctgctgactcactttatcaatagttccatttaaattgacttcagtggtgagactgtatcctgtttgctattgcttgttgtgctatggggggaggggggaggaatgtgtaagatagttaacatgggcaaagggagatcttggggtgcagcacttaaactgcctcgtaacccttttcatgatttcaaccacatttgctagagggagggagcagccacggagttagaggcccttggggtttctcttttccactgacaggctttcccaggcagctggctagttcattccctccccagccaggtgcaggcgtaggaatatggacatctggttgctttggcctgctgccctctttcaggggtcctaagcccacaatcatgcctccctaagaccttggcatccttccctctaagccgttggcacctctgtgccacctctcacactggctccagacacacagcctgtgcttttggagctgagatcactcgcttcaccctcctcatctttgttctccaagtaaagccacgaggtcggggcgagggcagaggtgatcacctgcgtgtcccatctacagacctgcagcttcataaaacttctgatttctcttcagctttgaaaagggttaccctgggcactggcctagagcctcacctcctaatagacttagccccatgagtttgccatgttgagcaggactatttctggcacttgcaagtcccatgatttcttcggtaattctgagggtggggggagggacatgaaatcatcttagcttagctttctgtctgtgaatgtctatatagtgtattgtgtgttttaacaaatgatttacactgactgttgctgtaaaagtgaatttggaaataaagttattactctgattaaa

SEQ ID NO: 529 - DNA, 6530 bp, Homo sapiens
  source 1..6530: mol_type = genomic DNA
gcagtcaccgccacccaccagctccggcaccaacagcagcgccgctgccaccgcccaccttctgccgccgccaccacagccaccttctcctcctccgctgtcctctcccgtcctcgcctctgtcgactatcaggtgaactttgaaccaggatggctgagccccgccaggagttcgaagtgatggaagatcacgctgggacgtacgggttgggggacaggaaagatcaggggggctacaccatgcaccaagaccaagagggtgacacggacgctggcctgaaagctgaagaagcaggcattggagacacccccagcctggaagacgaagctgctggtcacgtgacccaagaggagttgagagttccgggccggcagaggaaggcgcctgaaaggcccctggccaatgagattagcgcccacgtccagcctggaccctgcggagaggcctctggggtctctgggccgtgcctcggggagaaagagccagaagctcccgtcccgctgaccgcgagccttcctcagcaccgtcccgtttgcccagcgcctcctccaacaggaggccctcaggagccctccctggagtggggacaaaaaggcggggactgggccgagaagggtccggcctttccgaagcccgccaccactgcgtatctccacacagagcctgaaagtggtaaggtggtccaggaaggcttcctccgagagccaggccccccaggtctgagccaccagctcatgtccggcatgcctggggctcccctcctgcctgagggccccagagaggccacacgccaaccttcggggacaggacctgaggacacagagggcggccgccacgcccctgagctgctcaagcaccagcttctaggagacctgcaccaggaggggccgccgctgaagggggcagggggcaaagagaggccggggagcaaggaggaggtggatgaagaccgcgacgtcgatgagtcctccccccaagactcccctccctccaaggcctccccagcccaagatgggcggcctccccagacagccgccagagaagccaccagcatcccaggcttcccagcggagggtgccatccccctccctgtggatttcctctccaaagtttccacagagatcccagcctcagagcccgacgggcccagtgtagggcgggccaaagggcaggatgcccccctggagttcacgtttcacgtggaaatcacacccaacgtgcagaaggagcaggcgcactcggaggagcatttgggaagggctgcatttccaggggcccctggagaggggccagaggcccggggcccctctttgggagaggacacaaaagaggctgaccttccagagccctctgaaaagcagcctgctgctgctccgcgggggaagcccgtcagccgggtccctcaactcaaagctcgcatggtcagtaaaagcaaagacgggactggaagcgatgacaaaaaagccaagggggctgatggtaaaacgaagatcgccacaccgcggggagcagcccctccaggccagaagggccaggccaacgccaccaggattccagcaaaaaccccgcccgctccaaagacaccacccagctctggtgaacctccaaaatcaggggatcgcagcggctacagcagccccggctccccaggcactcccggcagccgctcccgcaccccgtcccttccaaccccacccacccgggagcccaagaaggtggcagtggtccgtactccacccaagtcgccgtcttccgccaagagccgcctgcagacagcccccgtgcccatgccagacctgaagaatgtcaagtccaagatcggctccactgagaacctgaagcaccagccgggaggcgggaaggtgcagataattaataagaagctggatcttagcaacgtccagtccaagtgtggctcaaaggataatatcaaacacgtcccgggaggcggcagtgtgcaaatagtctacaaaccagttgacctgagcaaggtgacctccaagtgtggctcattaggcaacatccatcataaaccaggaggtggccaggtggaagtaaaatctgagaagcttgacttcaaggacagagtccagtcgaagattgggtccctggacaatatcacccacgtccctggcggaggaaataaaaagattgaaacccacaagctgaccttccgcgagaacgccaaagccaagacagaccacggggcggagatcgtgtacaagtcgccagtggtgtctggggacacgtctccacggcatctcagcaatgtctcctccaccggcagcatcgacatggtagactcgccccagctcgccacgctagctgacgaggtgtctgcctccctggccaagcagggtttgtgatcaggcccctggggcggtcaataattgtggagaggagagaatgagagagtgtggaaaaaaaaagaataatgacccggcccccgccctctgcccccagctgctcctcgcagttcggttaattggttaatcacttaacctgcttttgtcactcggctttggctcgggacttcaaaatcagtgatgggagtaagagcaaatttcatctttccaaattgatgggtgggctagtaataaaatatttaaaaaaaaacattcaaaaacatggccacatccaacatttcctcaggcaattccttttgattcttttttcttccccctccatgtagaagagggagaaggagaggctctgaaagctgcttctgggggatttcaagggactgggggtgccaaccacctctggccctgttgtgggggtgtcacagaggcagtggcagcaacaaaggatttgaaacttggtgtgttcgtggagccacaggcagacgatgtcaaccttgtgtgagtgtgacgggggttggggtggggcgggaggccacgggggaggccgaggcaggggctgggcagaggggagaggaagcacaagaagtgggagtgggagaggaagccacgtgctggagagtagacatccccctccttgccgctgggagagccaaggcctatgccacctgcagcgtctgagcggccgcctgtccttggtggccgggggtgggggcctgctgtgggtcagtgtgccaccctctgcagggcagcctgtgggagaagggacagcgggtaaaaagagaaggcaagctggcaggagggtggcacttcgtggatgacctccttagaaaagactgaccttgatgtcttgagagcgctggcctcttcctccctccctgcagggtagggggcctgagttgaggggcttccctctgctccacagaaaccctgttttattgagttctgaaggttggaactgctgccatgattttggccactttgcagacctgggactttagggctaaccagttctctttgtaaggacttgtgcctcttgggagacgtccacccgtttccaagcctgggccactggcatctctggagtgtgtgggggtctgggaggcaggtcccgagccccctgtccttcccacggccactgcagtcaccccgtctgcgccgctgtgctgttgtctgccgtgagagcccaatcactgcctatacccctcatcacacgtcacaatgtcccgaattcccagcctcaccaccccttctcagtaatgaccctggttggttgcaggaggtacctactccatactgagggtgaaattaagggaaggcaaagtccaggcacaagagtgggaccccagcctctcactctcagttccactcatccaactgggaccctcaccacgaatctcatgatctgattcggttccctgtctcctcctcccgtcacagatgtgagccagggcactgctcagctgtgaccctaggtgtttctgccttgttgacatggagagagccctttcccctgagaaggcctggccccttcctgtgctgagcccacagcagcaggctgggtgtcttggttgtcagtggtggcaccaggatggaagggcaaggcacccagggcaggcccacagtcccgctgtcccccacttgcaccctagcttgtagctgccaacctcccagacagcccagcccgctgctcagctccacatgcatagtatcagccctccacacccgacaaaggggaacacacccccttggaaatggttcttttcccccagtcccagctggaagccatgctgtctgttctgctggagcagctgaacatatacatagatgttgccctgccctccccatctgcaccctgttgagttgtagttggatttgtctgtttatgcttggattcaccagagtgactatgatagtgaaaagaaaaaaaaaaaaaaaaaaggacgcatgtatcttgaaatgcttgtaaagaggtttctaacccaccctcacgaggtgtctctcacccccacactgggactcgtgtggcctgtgtggtgccaccctgctggggcctcccaagttttgaaaggctttcctcagcacctgggacccaacagagaccagcttctagcagctaaggaggccgttcagctgtgacgaaggcctgaagcacaggattaggactgaagcgatgatgtccccttccctacttccccttggggctccctgtgtcagggcacagactaggtcttgtggctggtctggcttgcggcgcgaggatggttctctctggtcatagcccgaagtctcatggcagtcccaaaggaggcttacaactcctgcatcacaagaaaaaggaagccactgccagctggggggatctgcagctcccagaagctccgtgagcctcagccacccctcagactgggttcctctccaagctcgccctctggaggggcagcgcagcctcccaccaagggccctgcgaccacagcagggattgggatgaattgcctgtcctggatctgctctagaggcccaagctgcctgcctgaggaaggatgacttgacaagtcaggagacactgttcccaaagccttgaccagagcacctcagcccgctgaccttgcacaaactccatctgctgccatgagaaaagggaagccgcctttgcaaaacattgctgcctaaagaaactcagcagcctcaggcccaattctgccacttctggtttgggtacagttaaaggcaaccctgagggacttggcagtagaaatccagggcctcccctggggctggcagcttcgtgtgcagctagagctttacctgaaaggaagtctctgggcccagaactctccaccaagagcctccctgccgttcgctgagtcccagcaattctcctaagttgaagggatctgagaaggagaaggaaatgtggggtagatttggtggtggttagagatatgcccccctcattactgccaacagtttcggctgcatttcttcacgcacctcggttcctcttcctgaagttcttgtgccctgctcttcagcaccatgggccttcttatacggaaggctctgggatctcccccttgtggggcaggctcttggggccagcctaagatcatggtttagggtgatcagtgctggcagataaattgaaaaggcacgctggcttgtgatcttaaatgaggacaatccccccagggctgggcactcctcccctcccctcacttctcccacctgcagagccagtgtccttgggtgggctagataggatatactgtatgccggctccttcaagctgctgactcactttatcaatagttccatttaaattgacttcagtggtgagactgtatcctgtttgctattgcttgttgtgctatggggggaggggggaggaatgtgtaagatagttaacatgggcaaagggagatcttggggtgcagcacttaaactgcctcgtaacccttttcatgatttcaaccacatttgctagagggagggagcagccacggagttagaggcccttggggtttctcttttccactgacaggctttcccaggcagctggctagttcattccctccccagccaggtgcaggcgtaggaatatggacatctggttgctttggcctgctgccctctttcaggggtcctaagcccacaatcatgcctccctaagaccttggcatccttccctctaagccgttggcacctctgtgccacctctcacactggctccagacacacagcctgtgcttttggagctgagatcactcgcttcaccctcctcatctttgttctccaagtaaagccacgaggtcggggcgagggcagaggtgatcacctgcgtgtcccatctacagacctgcagcttcataaaacttctgatttctcttcagctttgaaaagggttaccctgggcactggcctagagcctcacctcctaatagacttagccccatgagtttgccatgttgagcaggactatttctggcacttgcaagtcccatgatttcttcggtaattctgagggtggggggagggacatgaaatcatcttagcttagctttctgtctgtgaatgtctatatagtgtattgtgtgttttaacaaatgatttacactgactgttgctgtaaaagtgaatttggaaataaagttattactctgattaaa

SEQ ID NO: 530 - DNA, 6437 bp, Homo sapiens
  source 1..6437: mol_type = genomic DNA
gcagtcaccgccacccaccagctccggcaccaacagcagcgccgctgccaccgcccaccttctgccgccgccaccacagccaccttctcctcctccgctgtcctctcccgtcctcgcctctgtcgactatcaggtgaactttgaaccaggatggctgagccccgccaggagttcgaagtgatggaagatcacgctgggacgtacgggttgggggacaggaaagatcaggggggctacaccatgcaccaagaccaagagggtgacacggacgctggcctgaaagctgaagaagcaggcattggagacacccccagcctggaagacgaagctgctggtcacgtgacccaagaggagttgagagttccgggccggcagaggaaggcgcctgaaaggcccctggccaatgagattagcgcccacgtccagcctggaccctgcggagaggcctctggggtctctgggccgtgcctcggggagaaagagccagaagctcccgtcccgctgaccgcgagccttcctcagcaccgtcccgtttgcccagcgcctcctccaacaggaggccctcaggagccctccctggagtggggacaaaaaggcggggactgggccgagaagggtccggcctttccgaagcccgccaccactgcgtatctccacacagagcctgaaagtggtaaggtggtccaggaaggcttcctccgagagccaggccccccaggtctgagccaccagctcatgtccggcatgcctggggctcccctcctgcctgagggccccagagaggccacacgccaaccttcggggacaggacctgaggacacagagggcggccgccacgcccctgagctgctcaagcaccagcttctaggagacctgcaccaggaggggccgccgctgaagggggcagggggcaaagagaggccggggagcaaggaggaggtggatgaagaccgcgacgtcgatgagtcctccccccaagactcccctccctccaaggcctccccagcccaagatgggcggcctccccagacagccgccagagaagccaccagcatcccaggcttcccagcggagggtgccatccccctccctgtggatttcctctccaaagtttccacagagatcccagcctcagagcccgacgggcccagtgtagggcgggccaaagggcaggatgcccccctggagttcacgtttcacgtggaaatcacacccaacgtgcagaaggagcaggcgcactcggaggagcatttgggaagggctgcatttccaggggcccctggagaggggccagaggcccggggcccctctttgggagaggacacaaaagaggctgaccttccagagccctctgaaaagcagcctgctgctgctccgcgggggaagcccgtcagccgggtccctcaactcaaagctcgcatggtcagtaaaagcaaagacgggactggaagcgatgacaaaaaagccaagggggctgatggtaaaacgaagatcgccacaccgcggggagcagcccctccaggccagaagggccaggccaacgccaccaggattccagcaaaaaccccgcccgctccaaagacaccacccagctctggtgaacctccaaaatcaggggatcgcagcggctacagcagccccggctccccaggcactcccggcagccgctcccgcaccccgtcccttccaaccccacccacccgggagcccaagaaggtggcagtggtccgtactccacccaagtcgccgtcttccgccaagagccgcctgcagacagcccccgtgcccatgccagacctgaagaatgtcaagtccaagatcggctccactgagaacctgaagcaccagccgggaggcgggaaggtgcaaatagtctacaaaccagttgacctgagcaaggtgacctccaagtgtggctcattaggcaacatccatcataaaccaggaggtggccaggtggaagtaaaatctgagaagcttgacttcaaggacagagtccagtcgaagattgggtccctggacaatatcacccacgtccctggcggaggaaataaaaagattgaaacccacaagctgaccttccgcgagaacgccaaagccaagacagaccacggggcggagatcgtgtacaagtcgccagtggtgtctggggacacgtctccacggcatctcagcaatgtctcctccaccggcagcatcgacatggtagactcgccccagctcgccacgctagctgacgaggtgtctgcctccctggccaagcagggtttgtgatcaggcccctggggcggtcaataattgtggagaggagagaatgagagagtgtggaaaaaaaaagaataatgacccggcccccgccctctgcccccagctgctcctcgcagttcggttaattggttaatcacttaacctgcttttgtcactcggctttggctcgggacttcaaaatcagtgatgggagtaagagcaaatttcatctttccaaattgatgggtgggctagtaataaaatatttaaaaaaaaacattcaaaaacatggccacatccaacatttcctcaggcaattccttttgattcttttttcttccccctccatgtagaagagggagaaggagaggctctgaaagctgcttctgggggatttcaagggactgggggtgccaaccacctctggccctgttgtgggggtgtcacagaggcagtggcagcaacaaaggatttgaaacttggtgtgttcgtggagccacaggcagacgatgtcaaccttgtgtgagtgtgacgggggttggggtggggcgggaggccacgggggaggccgaggcaggggctgggcagaggggagaggaagcacaagaagtgggagtgggagaggaagccacgtgctggagagtagacatccccctccttgccgctgggagagccaaggcctatgccacctgcagcgtctgagcggccgcctgtccttggtggccgggggtgggggcctgctgtgggtcagtgtgccaccctctgcagggcagcctgtgggagaagggacagcgggtaaaaagagaaggcaagctggcaggagggtggcacttcgtggatgacctccttagaaaagactgaccttgatgtcttgagagcgctggcctcttcctccctccctgcagggtagggggcctgagttgaggggcttccctctgctccacagaaaccctgttttattgagttctgaaggttggaactgctgccatgattttggccactttgcagacctgggactttagggctaaccagttctctttgtaaggacttgtgcctcttgggagacgtccacccgtttccaagcctgggccactggcatctctggagtgtgtgggggtctgggaggcaggtcccgagccccctgtccttcccacggccactgcagtcaccccgtctgcgccgctgtgctgttgtctgccgtgagagcccaatcactgcctatacccctcatcacacgtcacaatgtcccgaattcccagcctcaccaccccttctcagtaatgaccctggttggttgcaggaggtacctactccatactgagggtgaaattaagggaaggcaaagtccaggcacaagagtgggaccccagcctctcactctcagttccactcatccaactgggaccctcaccacgaatctcatgatctgattcggttccctgtctcctcctcccgtcacagatgtgagccagggcactgctcagctgtgaccctaggtgtttctgccttgttgacatggagagagccctttcccctgagaaggcctggccccttcctgtgctgagcccacagcagcaggctgggtgtcttggttgtcagtggtggcaccaggatggaagggcaaggcacccagggcaggcccacagtcccgctgtcccccacttgcaccctagcttgtagctgccaacctcccagacagcccagcccgctgctcagctccacatgcatagtatcagccctccacacccgacaaaggggaacacacccccttggaaatggttcttttcccccagtcccagctggaagccatgctgtctgttctgctggagcagctgaacatatacatagatgttgccctgccctccccatctgcaccctgttgagttgtagttggatttgtctgtttatgcttggattcaccagagtgactatgatagtgaaaagaaaaaaaaaaaaaaaaaaggacgcatgtatcttgaaatgcttgtaaagaggtttctaacccaccctcacgaggtgtctctcacccccacactgggactcgtgtggcctgtgtggtgccaccctgctggggcctcccaagttttgaaaggctttcctcagcacctgggacccaacagagaccagcttctagcagctaaggaggccgttcagctgtgacgaaggcctgaagcacaggattaggactgaagcgatgatgtccccttccctacttccccttggggctccctgtgtcagggcacagactaggtcttgtggctggtctggcttgcggcgcgaggatggttctctctggtcatagcccgaagtctcatggcagtcccaaaggaggcttacaactcctgcatcacaagaaaaaggaagccactgccagctggggggatctgcagctcccagaagctccgtgagcctcagccacccctcagactgggttcctctccaagctcgccctctggaggggcagcgcagcctcccaccaagggccctgcgaccacagcagggattgggatgaattgcctgtcctggatctgctctagaggcccaagctgcctgcctgaggaaggatgacttgacaagtcaggagacactgttcccaaagccttgaccagagcacctcagcccgctgaccttgcacaaactccatctgctgccatgagaaaagggaagccgcctttgcaaaacattgctgcctaaagaaactcagcagcctcaggcccaattctgccacttctggtttgggtacagttaaaggcaaccctgagggacttggcagtagaaatccagggcctcccctggggctggcagcttcgtgtgcagctagagctttacctgaaaggaagtctctgggcccagaactctccaccaagagcctccctgccgttcgctgagtcccagcaattctcctaagttgaagggatctgagaaggagaaggaaatgtggggtagatttggtggtggttagagatatgcccccctcattactgccaacagtttcggctgcatttcttcacgcacctcggttcctcttcctgaagttcttgtgccctgctcttcagcaccatgggccttcttatacggaaggctctgggatctcccccttgtggggcaggctcttggggccagcctaagatcatggtttagggtgatcagtgctggcagataaattgaaaaggcacgctggcttgtgatcttaaatgaggacaatccccccagggctgggcactcctcccctcccctcacttctcccacctgcagagccagtgtccttgggtgggctagataggatatactgtatgccggctccttcaagctgctgactcactttatcaatagttccatttaaattgacttcagtggtgagactgtatcctgtttgctattgcttgttgtgctatggggggaggggggaggaatgtgtaagatagttaacatgggcaaagggagatcttggggtgcagcacttaaactgcctcgtaacccttttcatgatttcaaccacatttgctagagggagggagcagccacggagttagaggcccttggggtttctcttttccactgacaggctttcccaggcagctggctagttcattccctccccagccaggtgcaggcgtaggaatatggacatctggttgctttggcctgctgccctctttcaggggtcctaagcccacaatcatgcctccctaagaccttggcatccttccctctaagccgttggcacctctgtgccacctctcacactggctccagacacacagcctgtgcttttggagctgagatcactcgcttcaccctcctcatctttgttctccaagtaaagccacgaggtcggggcgagggcagaggtgatcacctgcgtgtcccatctacagacctgcagcttcataaaacttctgatttctcttcagctttgaaaagggttaccctgggcactggcctagagcctcacctcctaatagacttagccccatgagtttgccatgttgagcaggactatttctggcacttgcaagtcccatgatttcttcggtaattctgagggtggggggagggacatgaaatcatcttagcttagctttctgtctgtgaatgtctatatagtgtattgtgtgttttaacaaatgatttacactgactgttgctgtaaaagtgaatttggaaataaagttattactctgattaaa

SEQ ID NO: 531 - DNA, 5663 bp, Homo sapiens
  source 1..5663: mol_type = genomic DNA
gcagtcaccgccacccaccagctccggcaccaacagcagcgccgctgccaccgcccaccttctgccgccgccaccacagccaccttctcctcctccgctgtcctctcccgtcctcgcctctgtcgactatcaggtgaactttgaaccaggatggctgagccccgccaggagttcgaagtgatggaagatcacgctgggacgtacgggttgggggacaggaaagatcaggggggctacaccatgcaccaagaccaagagggtgacacggacgctggcctgaaagctgaagaagcaggcattggagacacccccagcctggaagacgaagctgctggtcacgtgacccaagctcgcatggtcagtaaaagcaaagacgggactggaagcgatgacaaaaaagccaagacatccacacgttcctctgctaaaaccttgaaaaataggccttgccttagccccaaacaccccactcctggtagctcagaccctctgatccaaccctccagccctgctgtgtgcccagagccaccttcctctcctaaatacgtctcttctgtcacttcccgaactggcagttctggagcaaaggagatgaaactcaagggggctgatggtaaaacgaagatcgccacaccgcggggagcagcccctccaggccagaagggccaggccaacgccaccaggattccagcaaaaaccccgcccgctccaaagacaccacccagctctggtgaacctccaaaatcaggggatcgcagcggctacagcagccccggctccccaggcactcccggcagccgctcccgcaccccgtcccttccaaccccacccacccgggagcccaagaaggtggcagtggtccgtactccacccaagtcgccgtcttccgccaagagccgcctgcagacagcccccgtgcccatgccagacctgaagaatgtcaagtccaagatcggctccactgagaacctgaagcaccagccgggaggcgggaaggtgcagataattaataagaagctggatcttagcaacgtccagtccaagtgtggctcaaaggataatatcaaacacgtcccgggaggcggcagtgtgcaaatagtctacaaaccagttgacctgagcaaggtgacctccaagtgtggctcattaggcaacatccatcataaaccaggaggtggccaggtggaagtaaaatctgagaagcttgacttcaaggacagagtccagtcgaagattgggtccctggacaatatcacccacgtccctggcggaggaaataaaaagattgaaacccacaagctgaccttccgcgagaacgccaaagccaagacagaccacggggcggagatcgtgtacaagtcgccagtggtgtctggggacacgtctccacggcatctcagcaatgtctcctccaccggcagcatcgacatggtagactcgccccagctcgccacgctagctgacgaggtgtctgcctccctggccaagcagggtttgtgatcaggcccctggggcggtcaataattgtggagaggagagaatgagagagtgtggaaaaaaaaagaataatgacccggcccccgccctctgcccccagctgctcctcgcagttcggttaattggttaatcacttaacctgcttttgtcactcggctttggctcgggacttcaaaatcagtgatgggagtaagagcaaatttcatctttccaaattgatgggtgggctagtaataaaatatttaaaaaaaaacattcaaaaacatggccacatccaacatttcctcaggcaattccttttgattcttttttcttccccctccatgtagaagagggagaaggagaggctctgaaagctgcttctgggggatttcaagggactgggggtgccaaccacctctggccctgttgtgggggtgtcacagaggcagtggcagcaacaaaggatttgaaacttggtgtgttcgtggagccacaggcagacgatgtcaaccttgtgtgagtgtgacgggggttggggtggggcgggaggccacgggggaggccgaggcaggggctgggcagaggggagaggaagcacaagaagtgggagtgggagaggaagccacgtgctggagagtagacatccccctccttgccgctgggagagccaaggcctatgccacctgcagcgtctgagcggccgcctgtccttggtggccgggggtgggggcctgctgtgggtcagtgtgccaccctctgcagggcagcctgtgggagaagggacagcgggtaaaaagagaaggcaagctggcaggagggtggcacttcgtggatgacctccttagaaaagactgaccttgatgtcttgagagcgctggcctcttcctccctccctgcagggtagggggcctgagttgaggggcttccctctgctccacagaaaccctgttttattgagttctgaaggttggaactgctgccatgattttggccactttgcagacctgggactttagggctaaccagttctctttgtaaggacttgtgcctcttgggagacgtccacccgtttccaagcctgggccactggcatctctggagtgtgtgggggtctgggaggcaggtcccgagccccctgtccttcccacggccactgcagtcaccccgtctgcgccgctgtgctgttgtctgccgtgagagcccaatcactgcctatacccctcatcacacgtcacaatgtcccgaattcccagcctcaccaccccttctcagtaatgaccctggttggttgcaggaggtacctactccatactgagggtgaaattaagggaaggcaaagtccaggcacaagagtgggaccccagcctctcactctcagttccactcatccaactgggaccctcaccacgaatctcatgatctgattcggttccctgtctcctcctcccgtcacagatgtgagccagggcactgctcagctgtgaccctaggtgtttctgccttgttgacatggagagagccctttcccctgagaaggcctggccccttcctgtgctgagcccacagcagcaggctgggtgtcttggttgtcagtggtggcaccaggatggaagggcaaggcacccagggcaggcccacagtcccgctgtcccccacttgcaccctagcttgtagctgccaacctcccagacagcccagcccgctgctcagctccacatgcatagtatcagccctccacacccgacaaaggggaacacacccccttggaaatggttcttttcccccagtcccagctggaagccatgctgtctgttctgctggagcagctgaacatatacatagatgttgccctgccctccccatctgcaccctgttgagttgtagttggatttgtctgtttatgcttggattcaccagagtgactatgatagtgaaaagaaaaaaaaaaaaaaaaaaggacgcatgtatcttgaaatgcttgtaaagaggtttctaacccaccctcacgaggtgtctctcacccccacactgggactcgtgtggcctgtgtggtgccaccctgctggggcctcccaagttttgaaaggctttcctcagcacctgggacccaacagagaccagcttctagcagctaaggaggccgttcagctgtgacgaaggcctgaagcacaggattaggactgaagcgatgatgtccccttccctacttccccttggggctccctgtgtcagggcacagactaggtcttgtggctggtctggcttgcggcgcgaggatggttctctctggtcatagcccgaagtctcatggcagtcccaaaggaggcttacaactcctgcatcacaagaaaaaggaagccactgccagctggggggatctgcagctcccagaagctccgtgagcctcagccacccctcagactgggttcctctccaagctcgccctctggaggggcagcgcagcctcccaccaagggccctgcgaccacagcagggattgggatgaattgcctgtcctggatctgctctagaggcccaagctgcctgcctgaggaaggatgacttgacaagtcaggagacactgttcccaaagccttgaccagagcacctcagcccgctgaccttgcacaaactccatctgctgccatgagaaaagggaagccgcctttgcaaaacattgctgcctaaagaaactcagcagcctcaggcccaattctgccacttctggtttgggtacagttaaaggcaaccctgagggacttggcagtagaaatccagggcctcccctggggctggcagcttcgtgtgcagctagagctttacctgaaaggaagtctctgggcccagaactctccaccaagagcctccctgccgttcgctgagtcccagcaattctcctaagttgaagggatctgagaaggagaaggaaatgtggggtagatttggtggtggttagagatatgcccccctcattactgccaacagtttcggctgcatttcttcacgcacctcggttcctcttcctgaagttcttgtgccctgctcttcagcaccatgggccttcttatacggaaggctctgggatctcccccttgtggggcaggctcttggggccagcctaagatcatggtttagggtgatcagtgctggcagataaattgaaaaggcacgctggcttgtgatcttaaatgaggacaatccccccagggctgggcactcctcccctcccctcacttctcccacctgcagagccagtgtccttgggtgggctagataggatatactgtatgccggctccttcaagctgctgactcactttatcaatagttccatttaaattgacttcagtggtgagactgtatcctgtttgctattgcttgttgtgctatggggggaggggggaggaatgtgtaagatagttaacatgggcaaagggagatcttggggtgcagcacttaaactgcctcgtaacccttttcatgatttcaaccacatttgctagagggagggagcagccacggagttagaggcccttggggtttctcttttccactgacaggctttcccaggcagctggctagttcattccctccccagccaggtgcaggcgtaggaatatggacatctggttgctttggcctgctgccctctttcaggggtcctaagcccacaatcatgcctccctaagaccttggcatccttccctctaagccgttggcacctctgtgccacctctcacactggctccagacacacagcctgtgcttttggagctgagatcactcgcttcaccctcctcatctttgttctccaagtaaagccacgaggtcggggcgagggcagaggtgatcacctgcgtgtcccatctacagacctgcagcttcataaaacttctgatttctcttcagctttgaaaagggttaccctgggcactggcctagagcctcacctcctaatagacttagccccatgagtttgccatgttgagcaggactatttctggcacttgcaagtcccatgatttcttcggtaattctgagggtggggggagggacatgaaatcatcttagcttagctttctgtctgtgaatgtctatatagtgtattgtgtgttttaacaaatgatttacactgactgttgctgtaaaagtgaatttggaaataaagttattactctgattaaa

SEQ ID NO: 532 - DNA, 5570 bp, Homo sapiens
  source 1..5570: mol_type = genomic DNA
gcagtcaccgccacccaccagctccggcaccaacagcagcgccgctgccaccgcccaccttctgccgccgccaccacagccaccttctcctcctccgctgtcctctcccgtcctcgcctctgtcgactatcaggtgaactttgaaccaggatggctgagccccgccaggagttcgaagtgatggaagatcacgctgggacgtacgggttgggggacaggaaagatcaggggggctacaccatgcaccaagaccaagagggtgacacggacgctggcctgaaagctgaagaagcaggcattggagacacccccagcctggaagacgaagctgctggtcacgtgacccaagctcgcatggtcagtaaaagcaaagacgggactggaagcgatgacaaaaaagccaagacatccacacgttcctctgctaaaaccttgaaaaataggccttgccttagccccaaacaccccactcctggtagctcagaccctctgatccaaccctccagccctgctgtgtgcccagagccaccttcctctcctaaatacgtctcttctgtcacttcccgaactggcagttctggagcaaaggagatgaaactcaagggggctgatggtaaaacgaagatcgccacaccgcggggagcagcccctccaggccagaagggccaggccaacgccaccaggattccagcaaaaaccccgcccgctccaaagacaccacccagctctggtgaacctccaaaatcaggggatcgcagcggctacagcagccccggctccccaggcactcccggcagccgctcccgcaccccgtcccttccaaccccacccacccgggagcccaagaaggtggcagtggtccgtactccacccaagtcgccgtcttccgccaagagccgcctgcagacagcccccgtgcccatgccagacctgaagaatgtcaagtccaagatcggctccactgagaacctgaagcaccagccgggaggcgggaaggtgcaaatagtctacaaaccagttgacctgagcaaggtgacctccaagtgtggctcattaggcaacatccatcataaaccaggaggtggccaggtggaagtaaaatctgagaagcttgacttcaaggacagagtccagtcgaagattgggtccctggacaatatcacccacgtccctggcggaggaaataaaaagattgaaacccacaagctgaccttccgcgagaacgccaaagccaagacagaccacggggcggagatcgtgtacaagtcgccagtggtgtctggggacacgtctccacggcatctcagcaatgtctcctccaccggcagcatcgacatggtagactcgccccagctcgccacgctagctgacgaggtgtctgcctccctggccaagcagggtttgtgatcaggcccctggggcggtcaataattgtggagaggagagaatgagagagtgtggaaaaaaaaagaataatgacccggcccccgccctctgcccccagctgctcctcgcagttcggttaattggttaatcacttaacctgcttttgtcactcggctttggctcgggacttcaaaatcagtgatgggagtaagagcaaatttcatctttccaaattgatgggtgggctagtaataaaatatttaaaaaaaaacattcaaaaacatggccacatccaacatttcctcaggcaattccttttgattcttttttcttccccctccatgtagaagagggagaaggagaggctctgaaagctgcttctgggggatttcaagggactgggggtgccaaccacctctggccctgttgtgggggtgtcacagaggcagtggcagcaacaaaggatttgaaacttggtgtgttcgtggagccacaggcagacgatgtcaaccttgtgtgagtgtgacgggggttggggtggggcgggaggccacgggggaggccgaggcaggggctgggcagaggggagaggaagcacaagaagtgggagtgggagaggaagccacgtgctggagagtagacatccccctccttgccgctgggagagccaaggcctatgccacctgcagcgtctgagcggccgcctgtccttggtggccgggggtgggggcctgctgtgggtcagtgtgccaccctctgcagggcagcctgtgggagaagggacagcgggtaaaaagagaaggcaagctggcaggagggtggcacttcgtggatgacctccttagaaaagactgaccttgatgtcttgagagcgctggcctcttcctccctccctgcagggtagggggcctgagttgaggggcttccctctgctccacagaaaccctgttttattgagttctgaaggttggaactgctgccatgattttggccactttgcagacctgggactttagggctaaccagttctctttgtaaggacttgtgcctcttgggagacgtccacccgtttccaagcctgggccactggcatctctggagtgtgtgggggtctgggaggcaggtcccgagccccctgtccttcccacggccactgcagtcaccccgtctgcgccgctgtgctgttgtctgccgtgagagcccaatcactgcctatacccctcatcacacgtcacaatgtcccgaattcccagcctcaccaccccttctcagtaatgaccctggttggttgcaggaggtacctactccatactgagggtgaaattaagggaaggcaaagtccaggcacaagagtgggaccccagcctctcactctcagttccactcatccaactgggaccctcaccacgaatctcatgatctgattcggttccctgtctcctcctcccgtcacagatgtgagccagggcactgctcagctgtgaccctaggtgtttctgccttgttgacatggagagagccctttcccctgagaaggcctggccccttcctgtgctgagcccacagcagcaggctgggtgtcttggttgtcagtggtggcaccaggatggaagggcaaggcacccagggcaggcccacagtcccgctgtcccccacttgcaccctagcttgtagctgccaacctcccagacagcccagcccgctgctcagctccacatgcatagtatcagccctccacacccgacaaaggggaacacacccccttggaaatggttcttttcccccagtcccagctggaagccatgctgtctgttctgctggagcagctgaacatatacatagatgttgccctgccctccccatctgcaccctgttgagttgtagttggatttgtctgtttatgcttggattcaccagagtgactatgatagtgaaaagaaaaaaaaaaaaaaaaaaggacgcatgtatcttgaaatgcttgtaaagaggtttctaacccaccctcacgaggtgtctctcacccccacactgggactcgtgtggcctgtgtggtgccaccctgctggggcctcccaagttttgaaaggctttcctcagcacctgggacccaacagagaccagcttctagcagctaaggaggccgttcagctgtgacgaaggcctgaagcacaggattaggactgaagcgatgatgtccccttccctacttccccttggggctccctgtgtcagggcacagactaggtcttgtggctggtctggcttgcggcgcgaggatggttctctctggtcatagcccgaagtctcatggcagtcccaaaggaggcttacaactcctgcatcacaagaaaaaggaagccactgccagctggggggatctgcagctcccagaagctccgtgagcctcagccacccctcagactgggttcctctccaagctcgccctctggaggggcagcgcagcctcccaccaagggccctgcgaccacagcagggattgggatgaattgcctgtcctggatctgctctagaggcccaagctgcctgcctgaggaaggatgacttgacaagtcaggagacactgttcccaaagccttgaccagagcacctcagcccgctgaccttgcacaaactccatctgctgccatgagaaaagggaagccgcctttgcaaaacattgctgcctaaagaaactcagcagcctcaggcccaattctgccacttctggtttgggtacagttaaaggcaaccctgagggacttggcagtagaaatccagggcctcccctggggctggcagcttcgtgtgcagctagagctttacctgaaaggaagtctctgggcccagaactctccaccaagagcctccctgccgttcgctgagtcccagcaattctcctaagttgaagggatctgagaaggagaaggaaatgtggggtagatttggtggtggttagagatatgcccccctcattactgccaacagtttcggctgcatttcttcacgcacctcggttcctcttcctgaagttcttgtgccctgctcttcagcaccatgggccttcttatacggaaggctctgggatctcccccttgtggggcaggctcttggggccagcctaagatcatggtttagggtgatcagtgctggcagataaattgaaaaggcacgctggcttgtgatcttaaatgaggacaatccccccagggctgggcactcctcccctcccctcacttctcccacctgcagagccagtgtccttgggtgggctagataggatatactgtatgccggctccttcaagctgctgactcactttatcaatagttccatttaaattgacttcagtggtgagactgtatcctgtttgctattgcttgttgtgctatggggggaggggggaggaatgtgtaagatagttaacatgggcaaagggagatcttggggtgcagcacttaaactgcctcgtaacccttttcatgatttcaaccacatttgctagagggagggagcagccacggagttagaggcccttggggtttctcttttccactgacaggctttcccaggcagctggctagttcattccctccccagccaggtgcaggcgtaggaatatggacatctggttgctttggcctgctgccctctttcaggggtcctaagcccacaatcatgcctccctaagaccttggcatccttccctctaagccgttggcacctctgtgccacctctcacactggctccagacacacagcctgtgcttttggagctgagatcactcgcttcaccctcctcatctttgttctccaagtaaagccacgaggtcggggcgagggcagaggtgatcacctgcgtgtcccatctacagacctgcagcttcataaaacttctgatttctcttcagctttgaaaagggttaccctgggcactggcctagagcctcacctcctaatagacttagccccatgagtttgccatgttgagcaggactatttctggcacttgcaagtcccatgatttcttcggtaattctgagggtggggggagggacatgaaatcatcttagcttagctttctgtctgtgaatgtctatatagtgtattgtgtgttttaacaaatgatttacactgactgttgctgtaaaagtgaatttggaaataaagttattactctgattaaa

SEQ ID NO: 533 - DNA, 5465 bp, Homo sapiens
  source 1..5465: mol_type = genomic DNA
gcagtcaccgccacccaccagctccggcaccaacagcagcgccgctgccaccgcccaccttctgccgccgccaccacagccaccttctcctcctccgctgtcctctcccgtcctcgcctctgtcgactatcaggtgaactttgaaccaggatggctgagccccgccaggagttcgaagtgatggaagatcacgctgggacgtacgggttgggggacaggaaagatcaggggggctacaccatgcaccaagaccaagagggtgacacggacgctggcctgaaagctgaagaagcaggcattggagacacccccagcctggaagacgaagctgctggtcacgtgacccaagctcgcatggtcagtaaaagcaaagacgggactggaagcgatgacaaaaaagccaagggggctgatggtaaaacgaagatcgccacaccgcggggagcagcccctccaggccagaagggccaggccaacgccaccaggattccagcaaaaaccccgcccgctccaaagacaccacccagctctggtgaacctccaaaatcaggggatcgcagcggctacagcagccccggctccccaggcactcccggcagccgctcccgcaccccgtcccttccaaccccacccacccgggagcccaagaaggtggcagtggtccgtactccacccaagtcgccgtcttccgccaagagccgcctgcagacagcccccgtgcccatgccagacctgaagaatgtcaagtccaagatcggctccactgagaacctgaagcaccagccgggaggcgggaaggtgcagataattaataagaagctggatcttagcaacgtccagtccaagtgtggctcaaaggataatatcaaacacgtcccgggaggcggcagtgtgcaaatagtctacaaaccagttgacctgagcaaggtgacctccaagtgtggctcattaggcaacatccatcataaaccaggaggtggccaggtggaagtaaaatctgagaagcttgacttcaaggacagagtccagtcgaagattgggtccctggacaatatcacccacgtccctggcggaggaaataaaaagattgaaacccacaagctgaccttccgcgagaacgccaaagccaagacagaccacggggcggagatcgtgtacaagtcgccagtggtgtctggggacacgtctccacggcatctcagcaatgtctcctccaccggcagcatcgacatggtagactcgccccagctcgccacgctagctgacgaggtgtctgcctccctggccaagcagggtttgtgatcaggcccctggggcggtcaataattgtggagaggagagaatgagagagtgtggaaaaaaaaagaataatgacccggcccccgccctctgcccccagctgctcctcgcagttcggttaattggttaatcacttaacctgcttttgtcactcggctttggctcgggacttcaaaatcagtgatgggagtaagagcaaatttcatctttccaaattgatgggtgggctagtaataaaatatttaaaaaaaaacattcaaaaacatggccacatccaacatttcctcaggcaattccttttgattcttttttcttccccctccatgtagaagagggagaaggagaggctctgaaagctgcttctgggggatttcaagggactgggggtgccaaccacctctggccctgttgtgggggtgtcacagaggcagtggcagcaacaaaggatttgaaacttggtgtgttcgtggagccacaggcagacgatgtcaaccttgtgtgagtgtgacgggggttggggtggggcgggaggccacgggggaggccgaggcaggggctgggcagaggggagaggaagcacaagaagtgggagtgggagaggaagccacgtgctggagagtagacatccccctccttgccgctgggagagccaaggcctatgccacctgcagcgtctgagcggccgcctgtccttggtggccgggggtgggggcctgctgtgggtcagtgtgccaccctctgcagggcagcctgtgggagaagggacagcgggtaaaaagagaaggcaagctggcaggagggtggcacttcgtggatgacctccttagaaaagactgaccttgatgtcttgagagcgctggcctcttcctccctccctgcagggtagggggcctgagttgaggggcttccctctgctccacagaaaccctgttttattgagttctgaaggttggaactgctgccatgattttggccactttgcagacctgggactttagggctaaccagttctctttgtaaggacttgtgcctcttgggagacgtccacccgtttccaagcctgggccactggcatctctggagtgtgtgggggtctgggaggcaggtcccgagccccctgtccttcccacggccactgcagtcaccccgtctgcgccgctgtgctgttgtctgccgtgagagcccaatcactgcctatacccctcatcacacgtcacaatgtcccgaattcccagcctcaccaccccttctcagtaatgaccctggttggttgcaggaggtacctactccatactgagggtgaaattaagggaaggcaaagtccaggcacaagagtgggaccccagcctctcactctcagttccactcatccaactgggaccctcaccacgaatctcatgatctgattcggttccctgtctcctcctcccgtcacagatgtgagccagggcactgctcagctgtgaccctaggtgtttctgccttgttgacatggagagagccctttcccctgagaaggcctggccccttcctgtgctgagcccacagcagcaggctgggtgtcttggttgtcagtggtggcaccaggatggaagggcaaggcacccagggcaggcccacagtcccgctgtcccccacttgcaccctagcttgtagctgccaacctcccagacagcccagcccgctgctcagctccacatgcatagtatcagccctccacacccgacaaaggggaacacacccccttggaaatggttcttttcccccagtcccagctggaagccatgctgtctgttctgctggagcagctgaacatatacatagatgttgccctgccctccccatctgcaccctgttgagttgtagttggatttgtctgtttatgcttggattcaccagagtgactatgatagtgaaaagaaaaaaaaaaaaaaaaaaggacgcatgtatcttgaaatgcttgtaaagaggtttctaacccaccctcacgaggtgtctctcacccccacactgggactcgtgtggcctgtgtggtgccaccctgctggggcctcccaagttttgaaaggctttcctcagcacctgggacccaacagagaccagcttctagcagctaaggaggccgttcagctgtgacgaaggcctgaagcacaggattaggactgaagcgatgatgtccccttccctacttccccttggggctccctgtgtcagggcacagactaggtcttgtggctggtctggcttgcggcgcgaggatggttctctctggtcatagcccgaagtctcatggcagtcccaaaggaggcttacaactcctgcatcacaagaaaaaggaagccactgccagctggggggatctgcagctcccagaagctccgtgagcctcagccacccctcagactgggttcctctccaagctcgccctctggaggggcagcgcagcctcccaccaagggccctgcgaccacagcagggattgggatgaattgcctgtcctggatctgctctagaggcccaagctgcctgcctgaggaaggatgacttgacaagtcaggagacactgttcccaaagccttgaccagagcacctcagcccgctgaccttgcacaaactccatctgctgccatgagaaaagggaagccgcctttgcaaaacattgctgcctaaagaaactcagcagcctcaggcccaattctgccacttctggtttgggtacagttaaaggcaaccctgagggacttggcagtagaaatccagggcctcccctggggctggcagcttcgtgtgcagctagagctttacctgaaaggaagtctctgggcccagaactctccaccaagagcctccctgccgttcgctgagtcccagcaattctcctaagttgaagggatctgagaaggagaaggaaatgtggggtagatttggtggtggttagagatatgcccccctcattactgccaacagtttcggctgcatttcttcacgcacctcggttcctcttcctgaagttcttgtgccctgctcttcagcaccatgggccttcttatacggaaggctctgggatctcccccttgtggggcaggctcttggggccagcctaagatcatggtttagggtgatcagtgctggcagataaattgaaaaggcacgctggcttgtgatcttaaatgaggacaatccccccagggctgggcactcctcccctcccctcacttctcccacctgcagagccagtgtccttgggtgggctagataggatatactgtatgccggctccttcaagctgctgactcactttatcaatagttccatttaaattgacttcagtggtgagactgtatcctgtttgctattgcttgttgtgctatggggggaggggggaggaatgtgtaagatagttaacatgggcaaagggagatcttggggtgcagcacttaaactgcctcgtaacccttttcatgatttcaaccacatttgctagagggagggagcagccacggagttagaggcccttggggtttctcttttccactgacaggctttcccaggcagctggctagttcattccctccccagccaggtgcaggcgtaggaatatggacatctggttgctttggcctgctgccctctttcaggggtcctaagcccacaatcatgcctccctaagaccttggcatccttccctctaagccgttggcacctctgtgccacctctcacactggctccagacacacagcctgtgcttttggagctgagatcactcgcttcaccctcctcatctttgttctccaagtaaagccacgaggtcggggcgagggcagaggtgatcacctgcgtgtcccatctacagacctgcagcttcataaaacttctgatttctcttcagctttgaaaagggttaccctgggcactggcctagagcctcacctcctaatagacttagccccatgagtttgccatgttgagcaggactatttctggcacttgcaagtcccatgatttcttcggtaattctgagggtggggggagggacatgaaatcatcttagcttagctttctgtctgtgaatgtctatatagtgtattgtgtgttttaacaaatgatttacactgactgttgctgtaaaagtgaatttggaaataaagttattactctgattaaa

SEQ ID NO: 534 - DNA, 5372 bp, Homo sapiens
  source 1..5372: mol_type = genomic DNA
gcagtcaccgccacccaccagctccggcaccaacagcagcgccgctgccaccgcccaccttctgccgccgccaccacagccaccttctcctcctccgctgtcctctcccgtcctcgcctctgtcgactatcaggtgaactttgaaccaggatggctgagccccgccaggagttcgaagtgatggaagatcacgctgggacgtacgggttgggggacaggaaagatcaggggggctacaccatgcaccaagaccaagagggtgacacggacgctggcctgaaagctgaagaagcaggcattggagacacccccagcctggaagacgaagctgctggtcacgtgacccaagctcgcatggtcagtaaaagcaaagacgggactggaagcgatgacaaaaaagccaagggggctgatggtaaaacgaagatcgccacaccgcggggagcagcccctccaggccagaagggccaggccaacgccaccaggattccagcaaaaaccccgcccgctccaaagacaccacccagctctggtgaacctccaaaatcaggggatcgcagcggctacagcagccccggctccccaggcactcccggcagccgctcccgcaccccgtcccttccaaccccacccacccgggagcccaagaaggtggcagtggtccgtactccacccaagtcgccgtcttccgccaagagccgcctgcagacagcccccgtgcccatgccagacctgaagaatgtcaagtccaagatcggctccactgagaacctgaagcaccagccgggaggcgggaaggtgcaaatagtctacaaaccagttgacctgagcaaggtgacctccaagtgtggctcattaggcaacatccatcataaaccaggaggtggccaggtggaagtaaaatctgagaagcttgacttcaaggacagagtccagtcgaagattgggtccctggacaatatcacccacgtccctggcggaggaaataaaaagattgaaacccacaagctgaccttccgcgagaacgccaaagccaagacagaccacggggcggagatcgtgtacaagtcgccagtggtgtctggggacacgtctccacggcatctcagcaatgtctcctccaccggcagcatcgacatggtagactcgccccagctcgccacgctagctgacgaggtgtctgcctccctggccaagcagggtttgtgatcaggcccctggggcggtcaataattgtggagaggagagaatgagagagtgtggaaaaaaaaagaataatgacccggcccccgccctctgcccccagctgctcctcgcagttcggttaattggttaatcacttaacctgcttttgtcactcggctttggctcgggacttcaaaatcagtgatgggagtaagagcaaatttcatctttccaaattgatgggtgggctagtaataaaatatttaaaaaaaaacattcaaaaacatggccacatccaacatttcctcaggcaattccttttgattcttttttcttccccctccatgtagaagagggagaaggagaggctctgaaagctgcttctgggggatttcaagggactgggggtgccaaccacctctggccctgttgtgggggtgtcacagaggcagtggcagcaacaaaggatttgaaacttggtgtgttcgtggagccacaggcagacgatgtcaaccttgtgtgagtgtgacgggggttggggtggggcgggaggccacgggggaggccgaggcaggggctgggcagaggggagaggaagcacaagaagtgggagtgggagaggaagccacgtgctggagagtagacatccccctccttgccgctgggagagccaaggcctatgccacctgcagcgtctgagcggccgcctgtccttggtggccgggggtgggggcctgctgtgggtcagtgtgccaccctctgcagggcagcctgtgggagaagggacagcgggtaaaaagagaaggcaagctggcaggagggtggcacttcgtggatgacctccttagaaaagactgaccttgatgtcttgagagcgctggcctcttcctccctccctgcagggtagggggcctgagttgaggggcttccctctgctccacagaaaccctgttttattgagttctgaaggttggaactgctgccatgattttggccactttgcagacctgggactttagggctaaccagttctctttgtaaggacttgtgcctcttgggagacgtccacccgtttccaagcctgggccactggcatctctggagtgtgtgggggtctgggaggcaggtcccgagccccctgtccttcccacggccactgcagtcaccccgtctgcgccgctgtgctgttgtctgccgtgagagcccaatcactgcctatacccctcatcacacgtcacaatgtcccgaattcccagcctcaccaccccttctcagtaatgaccctggttggttgcaggaggtacctactccatactgagggtgaaattaagggaaggcaaagtccaggcacaagagtgggaccccagcctctcactctcagttccactcatccaactgggaccctcaccacgaatctcatgatctgattcggttccctgtctcctcctcccgtcacagatgtgagccagggcactgctcagctgtgaccctaggtgtttctgccttgttgacatggagagagccctttcccctgagaaggcctggccccttcctgtgctgagcccacagcagcaggctgggtgtcttggttgtcagtggtggcaccaggatggaagggcaaggcacccagggcaggcccacagtcccgctgtcccccacttgcaccctagcttgtagctgccaacctcccagacagcccagcccgctgctcagctccacatgcatagtatcagccctccacacccgacaaaggggaacacacccccttggaaatggttcttttcccccagtcccagctggaagccatgctgtctgttctgctggagcagctgaacatatacatagatgttgccctgccctccccatctgcaccctgttgagttgtagttggatttgtctgtttatgcttggattcaccagagtgactatgatagtgaaaagaaaaaaaaaaaaaaaaaaggacgcatgtatcttgaaatgcttgtaaagaggtttctaacccaccctcacgaggtgtctctcacccccacactgggactcgtgtggcctgtgtggtgccaccctgctggggcctcccaagttttgaaaggctttcctcagcacctgggacccaacagagaccagcttctagcagctaaggaggccgttcagctgtgacgaaggcctgaagcacaggattaggactgaagcgatgatgtccccttccctacttccccttggggctccctgtgtcagggcacagactaggtcttgtggctggtctggcttgcggcgcgaggatggttctctctggtcatagcccgaagtctcatggcagtcccaaaggaggcttacaactcctgcatcacaagaaaaaggaagccactgccagctggggggatctgcagctcccagaagctccgtgagcctcagccacccctcagactgggttcctctccaagctcgccctctggaggggcagcgcagcctcccaccaagggccctgcgaccacagcagggattgggatgaattgcctgtcctggatctgctctagaggcccaagctgcctgcctgaggaaggatgacttgacaagtcaggagacactgttcccaaagccttgaccagagcacctcagcccgctgaccttgcacaaactccatctgctgccatgagaaaagggaagccgcctttgcaaaacattgctgcctaaagaaactcagcagcctcaggcccaattctgccacttctggtttgggtacagttaaaggcaaccctgagggacttggcagtagaaatccagggcctcccctggggctggcagcttcgtgtgcagctagagctttacctgaaaggaagtctctgggcccagaactctccaccaagagcctccctgccgttcgctgagtcccagcaattctcctaagttgaagggatctgagaaggagaaggaaatgtggggtagatttggtggtggttagagatatgcccccctcattactgccaacagtttcggctgcatttcttcacgcacctcggttcctcttcctgaagttcttgtgccctgctcttcagcaccatgggccttcttatacggaaggctctgggatctcccccttgtggggcaggctcttggggccagcctaagatcatggtttagggtgatcagtgctggcagataaattgaaaaggcacgctggcttgtgatcttaaatgaggacaatccccccagggctgggcactcctcccctcccctcacttctcccacctgcagagccagtgtccttgggtgggctagataggatatactgtatgccggctccttcaagctgctgactcactttatcaatagttccatttaaattgacttcagtggtgagactgtatcctgtttgctattgcttgttgtgctatggggggaggggggaggaatgtgtaagatagttaacatgggcaaagggagatcttggggtgcagcacttaaactgcctcgtaacccttttcatgatttcaaccacatttgctagagggagggagcagccacggagttagaggcccttggggtttctcttttccactgacaggctttcccaggcagctggctagttcattccctccccagccaggtgcaggcgtaggaatatggacatctggttgctttggcctgctgccctctttcaggggtcctaagcccacaatcatgcctccctaagaccttggcatccttccctctaagccgttggcacctctgtgccacctctcacactggctccagacacacagcctgtgcttttggagctgagatcactcgcttcaccctcctcatctttgttctccaagtaaagccacgaggtcggggcgagggcagaggtgatcacctgcgtgtcccatctacagacctgcagcttcataaaacttctgatttctcttcagctttgaaaagggttaccctgggcactggcctagagcctcacctcctaatagacttagccccatgagtttgccatgttgagcaggactatttctggcacttgcaagtcccatgatttcttcggtaattctgagggtggggggagggacatgaaatcatcttagcttagctttctgtctgtgaatgtctatatagtgtattgtgtgttttaacaaatgatttacactgactgttgctgtaaaagtgaatttggaaataaagttattactctgattaaa

SEQ ID NO: 535 - DNA, 3295 bp, Homo sapiens
  source 1..3295: mol_type = genomic DNA
gtcggatgattcaagctcacggggacgagcaggagcgctctcgacttttctagagcctcagcgtcctaggactcacctttccctgatcctgcaccgtccctctcctggccccagactctccctcccactgttcacgaagcccaggtacccactgatggtaatgctggcctgctggctgaaccccagattgccatgttctgtggcagactgaacatgcacatgaatgtccagaatgggaagtgggattcagatccatcagggaccaaaacctgcattgataccaaggaaggcatcctgcagtattgccaagaagtctaccctgaactgcagatcaccaatgtggtagaagccaaccaaccagtgaccatccagaactggtgcaagcggggccgcaagcagtgcaagacccatccccactttgtgattccctaccgctgcttagttggtgagtttgtaagtgatgcccttctcgttcctgacaagtgcaaattcttacaccaggagaggatggatgtttgcgaaactcatcttcactggcacaccgtcgccaaagagacatgcagtgagaagagtaccaacttgcatgactacggcatgttgctgccctgcggaattgacaagttccgaggggtagagtttgtgtgttgcccactggctgaagaaagtgacaatgtggattctgctgatgcggaggaggatgactcggatgtctggtggggcggagcagacacagactatgcagatgggagtgaagacaaagtagtagaagtagcagaggaggaagaagtggctgaggtggaagaagaagaagccgatgatgacgaggacgatgaggatggtgatgaggtagaggaagaggctgaggaaccctacgaagaagccacagagagaaccaccagcattgccaccaccaccaccaccaccacagagtctgtggaagaggtggttcgagttcctacaacagcagccagtacccctgatgccgttgacaagtatctcgagacacctggggatgagaatgaacatgcccatttccagaaagccaaagagaggcttgaggccaagcaccgagagagaatgtcccaggtcatgagagaatgggaagaggcagaacgtcaagcaaagaacttgcctaaagctgataagaaggcagttatccagcatttccaggagaaagtggaatctttggaacaggaagcagccaacgagagacagcagctggtggagacacacatggccagagtggaagccatgctcaatgaccgccgccgcctggccctggagaactacatcaccgctctgcaggctgttcctcctcggcctcgtcacgtgttcaatatgctaaagaagtatgtccgcgcagaacagaaggacagacagcacaccctaaagcatttcgagcatgtgcgcatggtggatcccaagaaagccgctcagatccggtcccaggttatgacacacctccgtgtgatttatgagcgcatgaatcagtctctctccctgctctacaacgtgcctgcagtggccgaggagattcaggatgaagttgatgagctgcttcagaaagagcaaaactattcagatgacgtcttggccaacatgattagtgaaccaaggatcagttacggaaacgatgctctcatgccatctttgaccgaaacgaaaaccaccgtggagctccttcccgtgaatggagagttcagcctggacgatctccagccgtggcattcttttggggctgactctgtgccagccaacacagaaaacgaagttgagcctgttgatgcccgccctgctgccgaccgaggactgaccactcgaccaggttctgggttgacaaatatcaagacggaggagatctctgaagtgaagatggatgcagaattccgacatgactcaggatatgaagttcatcatcaaaaattggtgttctttgcagaagatgtgggttcaaacaaaggtgcaatcattggactcatggtgggcggtgttgtcatagcgacagtgatcgtcatcaccttggtgatgctgaagaagaaacagtacacatccattcatcatggtgtggtggaggttgacgccgctgtcaccccagaggagcgccacctgtccaagatgcagcagaacggctacgaaaatccaacctacaagttctttgagcagatgcagaactagacccccgccacagcagcctctgaagttggacagcaaaaccattgcttcactacccatcggtgtccatttatagaataatgtgggaagaaacaaacccgttttatgatttactcattatcgccttttgacagctgtgctgtaacacaagtagatgcctgaacttgaattaatccacacatcagtaatgtattctatctctctttacattttggtctctatactacattattaatgggttttgtgtactgtaaagaatttagctgtatcaaactagtgcatgaatagattctctcctgattatttatcacatagccccttagccagttgtatattattcttgtggtttgtgacccaattaagtcctactttacatatgctttaagaatcgatgggggatgcttcatgtgaacgtgggagttcagctgcttctcttgcctaagtattcctttcctgatcactatgcattttaaagttaaacatttttaagtatttcagatgctttagagagattttttttccatgactgcattttactgtacagattgctgcttctgctatatttgtgatataggaattaagaggatacacacgtttgtttcttcgtgcctgttttatgtgcacacattaggcattgagacttcaagcttttctttttttgtccacgtatctttgggtctttgataaagaaaagaatccctgttcattgtaagcacttttacggggcgggtggggaggggtgctctgctggtcttcaattaccaagaattctccaaaacaattttctgcaggatgattgtacagaatcattgcttatgacatgatcgctttctacactgtattacataaataaattaaataaaataaccccgggcaagacttttctttgaaggatgactacagacattaaataatcgaagtaattttgggtggggagaagaggcagattcaattttctttaaccagtctgaagtttcatttatgatacaaaagaagatgaaaatggaagtggcaatataaggggatgaggaaggcatgcctggacaaacccttcttttaagatgtgtcttcaatttgtataaaatggtgttttcatgtaaataaatacattcttggaggagca

SEQ ID NO: 536 - DNA, 3190 bp, Homo sapiens
  source 1..3190: mol_type = genomic DNA
gtcagtttcctcggcagcggtaggcgagagcacgcggaggagcgtgcgcgggggccccgggagacggcggcggtggcggcgcgggcagagcaaggacgcggcggatcccactcgcacagcagcgcactcggtgccccgcgcagggtcgcgatgctgcccggtttggcactgctcctgctggccgcctggacggctcgggcgctggaggtctaccctgaactgcagatcaccaatgtggtagaagccaaccaaccagtgaccatccagaactggtgcaagcggggccgcaagcagtgcaagacccatccccactttgtgattccctaccgctgcttagttggtgagtttgtaagtgatgcccttctcgttcctgacaagtgcaaattcttacaccaggagaggatggatgtttgcgaaactcatcttcactggcacaccgtcgccaaagagacatgcagtgagaagagtaccaacttgcatgactacggcatgttgctgccctgcggaattgacaagttccgaggggtagagtttgtgtgttgcccactggctgaagaaagtgacaatgtggattctgctgatgcggaggaggatgactcggatgtctggtggggcggagcagacacagactatgcagatgggagtgaagacaaagtagtagaagtagcagaggaggaagaagtggctgaggtggaagaagaagaagccgatgatgacgaggacgatgaggatggtgatgaggtagaggaagaggctgaggaaccctacgaagaagccacagagagaaccaccagcattgccaccaccaccaccaccaccacagagtctgtggaagaggtggttcgagttcctacaacagcagccagtacccctgatgccgttgacaagtatctcgagacacctggggatgagaatgaacatgcccatttccagaaagccaaagagaggcttgaggccaagcaccgagagagaatgtcccaggtcatgagagaatgggaagaggcagaacgtcaagcaaagaacttgcctaaagctgataagaaggcagttatccagcatttccaggagaaagtggaatctttggaacaggaagcagccaacgagagacagcagctggtggagacacacatggccagagtggaagccatgctcaatgaccgccgccgcctggccctggagaactacatcaccgctctgcaggctgttcctcctcggcctcgtcacgtgttcaatatgctaaagaagtatgtccgcgcagaacagaaggacagacagcacaccctaaagcatttcgagcatgtgcgcatggtggatcccaagaaagccgctcagatccggtcccaggttatgacacacctccgtgtgatttatgagcgcatgaatcagtctctctccctgctctacaacgtgcctgcagtggccgaggagattcaggatgaagttgatgagctgcttcagaaagagcaaaactattcagatgacgtcttggccaacatgattagtgaaccaaggatcagttacggaaacgatgctctcatgccatctttgaccgaaacgaaaaccaccgtggagctccttcccgtgaatggagagttcagcctggacgatctccagccgtggcattcttttggggctgactctgtgccagccaacacagaaaacgaagttgagcctgttgatgcccgccctgctgccgaccgaggactgaccactcgaccaggttctgggttgacaaatatcaagacggaggagatctctgaagtgaagatggatgcagaattccgacatgactcaggatatgaagttcatcatcaaaaattggtgttctttgcagaagatgtgggttcaaacaaaggtgcaatcattggactcatggtgggcggtgttgtcatagcgacagtgatcgtcatcaccttggtgatgctgaagaagaaacagtacacatccattcatcatggtgtggtggaggttgacgccgctgtcaccccagaggagcgccacctgtccaagatgcagcagaacggctacgaaaatccaacctacaagttctttgagcagatgcagaactagacccccgccacagcagcctctgaagttggacagcaaaaccattgcttcactacccatcggtgtccatttatagaataatgtgggaagaaacaaacccgttttatgatttactcattatcgccttttgacagctgtgctgtaacacaagtagatgcctgaacttgaattaatccacacatcagtaatgtattctatctctctttacattttggtctctatactacattattaatgggttttgtgtactgtaaagaatttagctgtatcaaactagtgcatgaatagattctctcctgattatttatcacatagccccttagccagttgtatattattcttgtggtttgtgacccaattaagtcctactttacatatgctttaagaatcgatgggggatgcttcatgtgaacgtgggagttcagctgcttctcttgcctaagtattcctttcctgatcactatgcattttaaagttaaacatttttaagtatttcagatgctttagagagattttttttccatgactgcattttactgtacagattgctgcttctgctatatttgtgatataggaattaagaggatacacacgtttgtttcttcgtgcctgttttatgtgcacacattaggcattgagacttcaagcttttctttttttgtccacgtatctttgggtctttgataaagaaaagaatccctgttcattgtaagcacttttacggggcgggtggggaggggtgctctgctggtcttcaattaccaagaattctccaaaacaattttctgcaggatgattgtacagaatcattgcttatgacatgatcgctttctacactgtattacataaataaattaaataaaataaccccgggcaagacttttctttgaaggatgactacagacattaaataatcgaagtaattttgggtggggagaagaggcagattcaattttctttaaccagtctgaagtttcatttatgatacaaaagaagatgaaaatggaagtggcaatataaggggatgaggaaggcatgcctggacaaacccttcttttaagatgtgtcttcaatttgtataaaatggtgttttcatgtaaataaatacattcttggaggagca

SEQ ID NO: 537 - DNA, 3415 bp, Homo sapiens
  source 1..3415: mol_type = genomic DNA
gtcagtttcctcggcagcggtaggcgagagcacgcggaggagcgtgcgcgggggccccgggagacggcggcggtggcggcgcgggcagagcaaggacgcggcggatcccactcgcacagcagcgcactcggtgccccgcgcagggtcgcgatgctgcccggtttggcactgctcctgctggccgcctggacggctcgggcgctggaggtctaccctgaactgcagatcaccaatgtggtagaagccaaccaaccagtgaccatccagaactggtgcaagcggggccgcaagcagtgcaagacccatccccactttgtgattccctaccgctgcttagttggtgagtttgtaagtgatgcccttctcgttcctgacaagtgcaaattcttacaccaggagaggatggatgtttgcgaaactcatcttcactggcacaccgtcgccaaagagacatgcagtgagaagagtaccaacttgcatgactacggcatgttgctgccctgcggaattgacaagttccgaggggtagagtttgtgtgttgcccactggctgaagaaagtgacaatgtggattctgctgatgcggaggaggatgactcggatgtctggtggggcggagcagacacagactatgcagatgggagtgaagacaaagtagtagaagtagcagaggaggaagaagtggctgaggtggaagaagaagaagccgatgatgacgaggacgatgaggatggtgatgaggtagaggaagaggctgaggaaccctacgaagaagccacagagagaaccaccagcattgccaccaccaccaccaccaccacagagtctgtggaagaggtggttcgagaggtgtgctctgaacaagccgagacggggccgtgccgagcaatgatctcccgctggtactttgatgtgactgaagggaagtgtgccccattcttttacggcggatgtggcggcaaccggaacaactttgacacagaagagtactgcatggccgtgtgtggcagcgccatgtcccaaagtttactcaagactacccaggaacctcttgcccgagatcctgttaaacttcctacaacagcagccagtacccctgatgccgttgacaagtatctcgagacacctggggatgagaatgaacatgcccatttccagaaagccaaagagaggcttgaggccaagcaccgagagagaatgtcccaggtcatgagagaatgggaagaggcagaacgtcaagcaaagaacttgcctaaagctgataagaaggcagttatccagcatttccaggagaaagtggaatctttggaacaggaagcagccaacgagagacagcagctggtggagacacacatggccagagtggaagccatgctcaatgaccgccgccgcctggccctggagaactacatcaccgctctgcaggctgttcctcctcggcctcgtcacgtgttcaatatgctaaagaagtatgtccgcgcagaacagaaggacagacagcacaccctaaagcatttcgagcatgtgcgcatggtggatcccaagaaagccgctcagatccggtcccaggttatgacacacctccgtgtgatttatgagcgcatgaatcagtctctctccctgctctacaacgtgcctgcagtggccgaggagattcaggatgaagttgatgagctgcttcagaaagagcaaaactattcagatgacgtcttggccaacatgattagtgaaccaaggatcagttacggaaacgatgctctcatgccatctttgaccgaaacgaaaaccaccgtggagctccttcccgtgaatggagagttcagcctggacgatctccagccgtggcattcttttggggctgactctgtgccagccaacacagaaaacgaagttgagcctgttgatgcccgccctgctgccgaccgaggactgaccactcgaccaggttctgggttgacaaatatcaagacggaggagatctctgaagtgaagatggatgcagaattccgacatgactcaggatatgaagttcatcatcaaaaattggtgttctttgcagaagatgtgggttcaaacaaaggtgcaatcattggactcatggtgggcggtgttgtcatagcgacagtgatcgtcatcaccttggtgatgctgaagaagaaacagtacacatccattcatcatggtgtggtggaggttgacgccgctgtcaccccagaggagcgccacctgtccaagatgcagcagaacggctacgaaaatccaacctacaagttctttgagcagatgcagaactagacccccgccacagcagcctctgaagttggacagcaaaaccattgcttcactacccatcggtgtccatttatagaataatgtgggaagaaacaaacccgttttatgatttactcattatcgccttttgacagctgtgctgtaacacaagtagatgcctgaacttgaattaatccacacatcagtaatgtattctatctctctttacattttggtctctatactacattattaatgggttttgtgtactgtaaagaatttagctgtatcaaactagtgcatgaatagattctctcctgattatttatcacatagccccttagccagttgtatattattcttgtggtttgtgacccaattaagtcctactttacatatgctttaagaatcgatgggggatgcttcatgtgaacgtgggagttcagctgcttctcttgcctaagtattcctttcctgatcactatgcattttaaagttaaacatttttaagtatttcagatgctttagagagattttttttccatgactgcattttactgtacagattgctgcttctgctatatttgtgatataggaattaagaggatacacacgtttgtttcttcgtgcctgttttatgtgcacacattaggcattgagacttcaagcttttctttttttgtccacgtatctttgggtctttgataaagaaaagaatccctgttcattgtaagcacttttacggggcgggtggggaggggtgctctgctggtcttcaattaccaagaattctccaaaacaattttctgcaggatgattgtacagaatcattgcttatgacatgatcgctttctacactgtattacataaataaattaaataaaataaccccgggcaagacttttctttgaaggatgactacagacattaaataatcgaagtaattttgggtggggagaagaggcagattcaattttctttaaccagtctgaagtttcatttatgatacaaaagaagatgaaaatggaagtggcaatataaggggatgaggaaggcatgcctggacaaacccttcttttaagatgtgtcttcaatttgtataaaatggtgttttcatgtaaataaatacattcttggaggagca

SEQ ID NO: 538 - DNA, 3304 bp, Homo sapiens
  source 1..3304: mol_type = genomic DNA
gtcagtttcctcggcagcggtaggcgagagcacgcggaggagcgtgcgcgggggccccgggagacggcggcggtggcggcgcgggcagagcaaggacgcggcggatcccactcgcacagcagcgcactcggtgccccgcgcagggtcgcgatgctgcccggtttggcactgctcctgctggccgcctggacggctcgggcgctggaggtacccactgatggtaatgctggcctgctggctgaaccccagattgccatgttctgtggcagactgaacatgcacatgaatgtccagaatgggaagtgggattcagatccatcagggaccaaaacctgcattgataccaaggaaggcatcctgcagtattgccaagaagtctaccctgaactgcagatcaccaatgtggtagaagccaaccaaccagtgaccatccagaactggtgcaagcggggccgcaagcagtgcaagacccatccccactttgtgattccctaccgctgcttagttggtgagtttgtaagtgatgcccttctcgttcctgacaagtgcaaattcttacaccaggagaggatggatgtttgcgaaactcatcttcactggcacaccgtcgccaaagagacatgcagtgagaagagtaccaacttgcatgactacggcatgttgctgccctgcggaattgacaagttccgaggggtagagtttgtgtgttgcccactggctgaagaaagtgacaatgtggattctgctgatgcggaggaggatgactcggatgtctggtggggcggagcagacacagactatgcagatgggagtgaagacaaagtagtagaagtagcagaggaggaagaagtggctgaggtggaagaagaagaagccgatgatgacgaggacgatgaggatggtgatgaggtagaggaagaggctgaggaaccctacgaagaagccacagagagaaccaccagcattgccaccaccaccaccaccaccacagagtctgtggaagaggtggttcgagttcctacaacagcagccagtacccctgatgccgttgacaagtatctcgagacacctggggatgagaatgaacatgcccatttccagaaagccaaagagaggcttgaggccaagcaccgagagagaatgtcccaggtcatgagagaatgggaagaggcagaacgtcaagcaaagaacttgcctaaagctgataagaaggcagttatccagcatttccaggagaaagtggaatctttggaacaggaagcagccaacgagagacagcagctggtggagacacacatggccagagtggaagccatgctcaatgaccgccgccgcctggccctggagaactacatcaccgctctgcaggctgttcctcctcggcctcgtcacgtgttcaatatgctaaagaagtatgtccgcgcagaacagaaggacagacagcacaccctaaagcatttcgagcatgtgcgcatggtggatcccaagaaagccgctcagatccggtcccaggttatgacacacctccgtgtgatttatgagcgcatgaatcagtctctctccctgctctacaacgtgcctgcagtggccgaggagattcaggatgaagttgatgagctgcttcagaaagagcaaaactattcagatgacgtcttggccaacatgattagtgaaccaaggatcagttacggaaacgatgctctcatgccatctttgaccgaaacgaaaaccaccgtggagctccttcccgtgaatggagagttcagcctggacgatctccagccgtggcattcttttggggctgactctgtgccagccaacacagaaaacgaaggttctgggttgacaaatatcaagacggaggagatctctgaagtgaagatggatgcagaattccgacatgactcaggatatgaagttcatcatcaaaaattggtgttctttgcagaagatgtgggttcaaacaaaggtgcaatcattggactcatggtgggcggtgttgtcatagcgacagtgatcgtcatcaccttggtgatgctgaagaagaaacagtacacatccattcatcatggtgtggtggaggttgacgccgctgtcaccccagaggagcgccacctgtccaagatgcagcagaacggctacgaaaatccaacctacaagttctttgagcagatgcagaactagacccccgccacagcagcctctgaagttggacagcaaaaccattgcttcactacccatcggtgtccatttatagaataatgtgggaagaaacaaacccgttttatgatttactcattatcgccttttgacagctgtgctgtaacacaagtagatgcctgaacttgaattaatccacacatcagtaatgtattctatctctctttacattttggtctctatactacattattaatgggttttgtgtactgtaaagaatttagctgtatcaaactagtgcatgaatagattctctcctgattatttatcacatagccccttagccagttgtatattattcttgtggtttgtgacccaattaagtcctactttacatatgctttaagaatcgatgggggatgcttcatgtgaacgtgggagttcagctgcttctcttgcctaagtattcctttcctgatcactatgcattttaaagttaaacatttttaagtatttcagatgctttagagagattttttttccatgactgcattttactgtacagattgctgcttctgctatatttgtgatataggaattaagaggatacacacgtttgtttcttcgtgcctgttttatgtgcacacattaggcattgagacttcaagcttttctttttttgtccacgtatctttgggtctttgataaagaaaagaatccctgttcattgtaagcacttttacggggcgggtggggaggggtgctctgctggtcttcaattaccaagaattctccaaaacaattttctgcaggatgattgtacagaatcattgcttatgacatgatcgctttctacactgtattacataaataaattaaataaaataaccccgggcaagacttttctttgaaggatgactacagacattaaataatcgaagtaattttgggtggggagaagaggcagattcaattttctttaaccagtctgaagtttcatttatgatacaaaagaagatgaaaatggaagtggcaatataaggggatgaggaaggcatgcctggacaaacccttcttttaagatgtgtcttcaatttgtataaaatggtgttttcatgtaaataaatacattcttggaggagca

SEQ ID NO: 539 - DNA, 3358 bp, Homo sapiens
  source 1..3358: mol_type = genomic DNA
gtcagtttcctcggcagcggtaggcgagagcacgcggaggagcgtgcgcgggggccccgggagacggcggcggtggcggcgcgggcagagcaaggacgcggcggatcccactcgcacagcagcgcactcggtgccccgcgcagggtcgcgatgctgcccggtttggcactgctcctgctggccgcctggacggctcgggcgctggaggtacccactgatggtaatgctggcctgctggctgaaccccagattgccatgttctgtggcagactgaacatgcacatgaatgtccagaatgggaagtgggattcagatccatcagggaccaaaacctgcattgataccaaggaaggcatcctgcagtattgccaagaagtctaccctgaactgcagatcaccaatgtggtagaagccaaccaaccagtgaccatccagaactggtgcaagcggggccgcaagcagtgcaagacccatccccactttgtgattccctaccgctgcttagttggtgagtttgtaagtgatgcccttctcgttcctgacaagtgcaaattcttacaccaggagaggatggatgtttgcgaaactcatcttcactggcacaccgtcgccaaagagacatgcagtgagaagagtaccaacttgcatgactacggcatgttgctgccctgcggaattgacaagttccgaggggtagagtttgtgtgttgcccactggctgaagaaagtgacaatgtggattctgctgatgcggaggaggatgactcggatgtctggtggggcggagcagacacagactatgcagatgggagtgaagacaaagtagtagaagtagcagaggaggaagaagtggctgaggtggaagaagaagaagccgatgatgacgaggacgatgaggatggtgatgaggtagaggaagaggctgaggaaccctacgaagaagccacagagagaaccaccagcattgccaccaccaccaccaccaccacagagtctgtggaagaggtggttcgagttcctacaacagcagccagtacccctgatgccgttgacaagtatctcgagacacctggggatgagaatgaacatgcccatttccagaaagccaaagagaggcttgaggccaagcaccgagagagaatgtcccaggtcatgagagaatgggaagaggcagaacgtcaagcaaagaacttgcctaaagctgataagaaggcagttatccagcatttccaggagaaagtggaatctttggaacaggaagcagccaacgagagacagcagctggtggagacacacatggccagagtggaagccatgctcaatgaccgccgccgcctggccctggagaactacatcaccgctctgcaggctgttcctcctcggcctcgtcacgtgttcaatatgctaaagaagtatgtccgcgcagaacagaaggacagacagcacaccctaaagcatttcgagcatgtgcgcatggtggatcccaagaaagccgctcagatccggtcccaggttatgacacacctccgtgtgatttatgagcgcatgaatcagtctctctccctgctctacaacgtgcctgcagtggccgaggagattcaggatgaagttgatgagctgcttcagaaagagcaaaactattcagatgacgtcttggccaacatgattagtgaaccaaggatcagttacggaaacgatgctctcatgccatctttgaccgaaacgaaaaccaccgtggagctccttcccgtgaatggagagttcagcctggacgatctccagccgtggcattcttttggggctgactctgtgccagccaacacagaaaacgaagttgagcctgttgatgcccgccctgctgccgaccgaggactgaccactcgaccaggttctgggttgacaaatatcaagacggaggagatctctgaagtgaagatggatgcagaattccgacatgactcaggatatgaagttcatcatcaaaaattggtgttctttgcagaagatgtgggttcaaacaaaggtgcaatcattggactcatggtgggcggtgttgtcatagcgacagtgatcgtcatcaccttggtgatgctgaagaagaaacagtacacatccattcatcatggtgtggtggaggttgacgccgctgtcaccccagaggagcgccacctgtccaagatgcagcagaacggctacgaaaatccaacctacaagttctttgagcagatgcagaactagacccccgccacagcagcctctgaagttggacagcaaaaccattgcttcactacccatcggtgtccatttatagaataatgtgggaagaaacaaacccgttttatgatttactcattatcgccttttgacagctgtgctgtaacacaagtagatgcctgaacttgaattaatccacacatcagtaatgtattctatctctctttacattttggtctctatactacattattaatgggttttgtgtactgtaaagaatttagctgtatcaaactagtgcatgaatagattctctcctgattatttatcacatagccccttagccagttgtatattattcttgtggtttgtgacccaattaagtcctactttacatatgctttaagaatcgatgggggatgcttcatgtgaacgtgggagttcagctgcttctcttgcctaagtattcctttcctgatcactatgcattttaaagttaaacatttttaagtatttcagatgctttagagagattttttttccatgactgcattttactgtacagattgctgcttctgctatatttgtgatataggaattaagaggatacacacgtttgtttcttcgtgcctgttttatgtgcacacattaggcattgagacttcaagcttttctttttttgtccacgtatctttgggtctttgataaagaaaagaatccctgttcattgtaagcacttttacggggcgggtggggaggggtgctctgctggtcttcaattaccaagaattctccaaaacaattttctgcaggatgattgtacagaatcattgcttatgacatgatcgctttctacactgtattacataaataaattaaataaaataaccccgggcaagacttttctttgaaggatgactacagacattaaataatcgaagtaattttgggtggggagaagaggcagattcaattttctttaaccagtctgaagtttcatttatgatacaaaagaagatgaaaatggaagtggcaatataaggggatgaggaaggcatgcctggacaaacccttcttttaagatgtgtcttcaatttgtataaaatggtgttttcatgtaaataaatacattcttggaggagca

SEQ ID NO: 540 - DNA, 3415 bp, Homo sapiens
  source 1..3415: mol_type = genomic DNA
gtcagtttcctcggcagcggtaggcgagagcacgcggaggagcgtgcgcgggggccccgggagacggcggcggtggcggcgcgggcagagcaaggacgcggcggatcccactcgcacagcagcgcactcggtgccccgcgcagggtcgcgatgctgcccggtttggcactgctcctgctggccgcctggacggctcgggcgctggaggtacccactgatggtaatgctggcctgctggctgaaccccagattgccatgttctgtggcagactgaacatgcacatgaatgtccagaatgggaagtgggattcagatccatcagggaccaaaacctgcattgataccaaggaaggcatcctgcagtattgccaagaagtctaccctgaactgcagatcaccaatgtggtagaagccaaccaaccagtgaccatccagaactggtgcaagcggggccgcaagcagtgcaagacccatccccactttgtgattccctaccgctgcttagttggtgagtttgtaagtgatgcccttctcgttcctgacaagtgcaaattcttacaccaggagaggatggatgtttgcgaaactcatcttcactggcacaccgtcgccaaagagacatgcagtgagaagagtaccaacttgcatgactacggcatgttgctgccctgcggaattgacaagttccgaggggtagagtttgtgtgttgcccactggctgaagaaagtgacaatgtggattctgctgatgcggaggaggatgactcggatgtctggtggggcggagcagacacagactatgcagatgggagtgaagacaaagtagtagaagtagcagaggaggaagaagtggctgaggtggaagaagaagaagccgatgatgacgaggacgatgaggatggtgatgaggtagaggaagaggctgaggaaccctacgaagaagccacagagagaaccaccagcattgccaccaccaccaccaccaccacagagtctgtggaagaggtggttcgagtgtcccaaagtttactcaagactacccaggaacctcttgcccgagatcctgttaaacttcctacaacagcagccagtacccctgatgccgttgacaagtatctcgagacacctggggatgagaatgaacatgcccatttccagaaagccaaagagaggcttgaggccaagcaccgagagagaatgtcccaggtcatgagagaatgggaagaggcagaacgtcaagcaaagaacttgcctaaagctgataagaaggcagttatccagcatttccaggagaaagtggaatctttggaacaggaagcagccaacgagagacagcagctggtggagacacacatggccagagtggaagccatgctcaatgaccgccgccgcctggccctggagaactacatcaccgctctgcaggctgttcctcctcggcctcgtcacgtgttcaatatgctaaagaagtatgtccgcgcagaacagaaggacagacagcacaccctaaagcatttcgagcatgtgcgcatggtggatcccaagaaagccgctcagatccggtcccaggttatgacacacctccgtgtgatttatgagcgcatgaatcagtctctctccctgctctacaacgtgcctgcagtggccgaggagattcaggatgaagttgatgagctgcttcagaaagagcaaaactattcagatgacgtcttggccaacatgattagtgaaccaaggatcagttacggaaacgatgctctcatgccatctttgaccgaaacgaaaaccaccgtggagctccttcccgtgaatggagagttcagcctggacgatctccagccgtggcattcttttggggctgactctgtgccagccaacacagaaaacgaagttgagcctgttgatgcccgccctgctgccgaccgaggactgaccactcgaccaggttctgggttgacaaatatcaagacggaggagatctctgaagtgaagatggatgcagaattccgacatgactcaggatatgaagttcatcatcaaaaattggtgttctttgcagaagatgtgggttcaaacaaaggtgcaatcattggactcatggtgggcggtgttgtcatagcgacagtgatcgtcatcaccttggtgatgctgaagaagaaacagtacacatccattcatcatggtgtggtggaggttgacgccgctgtcaccccagaggagcgccacctgtccaagatgcagcagaacggctacgaaaatccaacctacaagttctttgagcagatgcagaactagacccccgccacagcagcctctgaagttggacagcaaaaccattgcttcactacccatcggtgtccatttatagaataatgtgggaagaaacaaacccgttttatgatttactcattatcgccttttgacagctgtgctgtaacacaagtagatgcctgaacttgaattaatccacacatcagtaatgtattctatctctctttacattttggtctctatactacattattaatgggttttgtgtactgtaaagaatttagctgtatcaaactagtgcatgaatagattctctcctgattatttatcacatagccccttagccagttgtatattattcttgtggtttgtgacccaattaagtcctactttacatatgctttaagaatcgatgggggatgcttcatgtgaacgtgggagttcagctgcttctcttgcctaagtattcctttcctgatcactatgcattttaaagttaaacatttttaagtatttcagatgctttagagagattttttttccatgactgcattttactgtacagattgctgcttctgctatatttgtgatataggaattaagaggatacacacgtttgtttcttcgtgcctgttttatgtgcacacattaggcattgagacttcaagcttttctttttttgtccacgtatctttgggtctttgataaagaaaagaatccctgttcattgtaagcacttttacggggcgggtggggaggggtgctctgctggtcttcaattaccaagaattctccaaaacaattttctgcaggatgattgtacagaatcattgcttatgacatgatcgctttctacactgtattacataaataaattaaataaaataaccccgggcaagacttttctttgaaggatgactacagacattaaataatcgaagtaattttgggtggggagaagaggcagattcaattttctttaaccagtctgaagtttcatttatgatacaaaagaagatgaaaatggaagtggcaatataaggggatgaggaaggcatgcctggacaaacccttcttttaagatgtgtcttcaatttgtataaaatggtgttttcatgtaaataaatacattcttggaggagca

SEQ ID NO: 541 - DNA, 3472 bp, Homo sapiens
  source 1..3472: mol_type = genomic DNA
gtcagtttcctcggcagcggtaggcgagagcacgcggaggagcgtgcgcgggggccccgggagacggcggcggtggcggcgcgggcagagcaaggacgcggcggatcccactcgcacagcagcgcactcggtgccccgcgcagggtcgcgatgctgcccggtttggcactgctcctgctggccgcctggacggctcgggcgctggaggtacccactgatggtaatgctggcctgctggctgaaccccagattgccatgttctgtggcagactgaacatgcacatgaatgtccagaatgggaagtgggattcagatccatcagggaccaaaacctgcattgataccaaggaaggcatcctgcagtattgccaagaagtctaccctgaactgcagatcaccaatgtggtagaagccaaccaaccagtgaccatccagaactggtgcaagcggggccgcaagcagtgcaagacccatccccactttgtgattccctaccgctgcttagttggtgagtttgtaagtgatgcccttctcgttcctgacaagtgcaaattcttacaccaggagaggatggatgtttgcgaaactcatcttcactggcacaccgtcgccaaagagacatgcagtgagaagagtaccaacttgcatgactacggcatgttgctgccctgcggaattgacaagttccgaggggtagagtttgtgtgttgcccactggctgaagaaagtgacaatgtggattctgctgatgcggaggaggatgactcggatgtctggtggggcggagcagacacagactatgcagatgggagtgaagacaaagtagtagaagtagcagaggaggaagaagtggctgaggtggaagaagaagaagccgatgatgacgaggacgatgaggatggtgatgaggtagaggaagaggctgaggaaccctacgaagaagccacagagagaaccaccagcattgccaccaccaccaccaccaccacagagtctgtggaagaggtggttcgagaggtgtgctctgaacaagccgagacggggccgtgccgagcaatgatctcccgctggtactttgatgtgactgaagggaagtgtgccccattcttttacggcggatgtggcggcaaccggaacaactttgacacagaagagtactgcatggccgtgtgtggcagcgccattcctacaacagcagccagtacccctgatgccgttgacaagtatctcgagacacctggggatgagaatgaacatgcccatttccagaaagccaaagagaggcttgaggccaagcaccgagagagaatgtcccaggtcatgagagaatgggaagaggcagaacgtcaagcaaagaacttgcctaaagctgataagaaggcagttatccagcatttccaggagaaagtggaatctttggaacaggaagcagccaacgagagacagcagctggtggagacacacatggccagagtggaagccatgctcaatgaccgccgccgcctggccctggagaactacatcaccgctctgcaggctgttcctcctcggcctcgtcacgtgttcaatatgctaaagaagtatgtccgcgcagaacagaaggacagacagcacaccctaaagcatttcgagcatgtgcgcatggtggatcccaagaaagccgctcagatccggtcccaggttatgacacacctccgtgtgatttatgagcgcatgaatcagtctctctccctgctctacaacgtgcctgcagtggccgaggagattcaggatgaagttgatgagctgcttcagaaagagcaaaactattcagatgacgtcttggccaacatgattagtgaaccaaggatcagttacggaaacgatgctctcatgccatctttgaccgaaacgaaaaccaccgtggagctccttcccgtgaatggagagttcagcctggacgatctccagccgtggcattcttttggggctgactctgtgccagccaacacagaaaacgaaggttctgggttgacaaatatcaagacggaggagatctctgaagtgaagatggatgcagaattccgacatgactcaggatatgaagttcatcatcaaaaattggtgttctttgcagaagatgtgggttcaaacaaaggtgcaatcattggactcatggtgggcggtgttgtcatagcgacagtgatcgtcatcaccttggtgatgctgaagaagaaacagtacacatccattcatcatggtgtggtggaggttgacgccgctgtcaccccagaggagcgccacctgtccaagatgcagcagaacggctacgaaaatccaacctacaagttctttgagcagatgcagaactagacccccgccacagcagcctctgaagttggacagcaaaaccattgcttcactacccatcggtgtccatttatagaataatgtgggaagaaacaaacccgttttatgatttactcattatcgccttttgacagctgtgctgtaacacaagtagatgcctgaacttgaattaatccacacatcagtaatgtattctatctctctttacattttggtctctatactacattattaatgggttttgtgtactgtaaagaatttagctgtatcaaactagtgcatgaatagattctctcctgattatttatcacatagccccttagccagttgtatattattcttgtggtttgtgacccaattaagtcctactttacatatgctttaagaatcgatgggggatgcttcatgtgaacgtgggagttcagctgcttctcttgcctaagtattcctttcctgatcactatgcattttaaagttaaacatttttaagtatttcagatgctttagagagattttttttccatgactgcattttactgtacagattgctgcttctgctatatttgtgatataggaattaagaggatacacacgtttgtttcttcgtgcctgttttatgtgcacacattaggcattgagacttcaagcttttctttttttgtccacgtatctttgggtctttgataaagaaaagaatccctgttcattgtaagcacttttacggggcgggtggggaggggtgctctgctggtcttcaattaccaagaattctccaaaacaattttctgcaggatgattgtacagaatcattgcttatgacatgatcgctttctacactgtattacataaataaattaaataaaataaccccgggcaagacttttctttgaaggatgactacagacattaaataatcgaagtaattttgggtggggagaagaggcagattcaattttctttaaccagtctgaagtttcatttatgatacaaaagaagatgaaaatggaagtggcaatataaggggatgaggaaggcatgcctggacaaacccttcttttaagatgtgtcttcaatttgtataaaatggtgttttcatgtaaataaatacattcttggaggagca

SEQ ID NO: 542 - DNA, 3526 bp, Homo sapiens
  source 1..3526: mol_type = genomic DNA
gtcagtttcctcggcagcggtaggcgagagcacgcggaggagcgtgcgcgggggccccgggagacggcggcggtggcggcgcgggcagagcaaggacgcggcggatcccactcgcacagcagcgcactcggtgccccgcgcagggtcgcgatgctgcccggtttggcactgctcctgctggccgcctggacggctcgggcgctggaggtacccactgatggtaatgctggcctgctggctgaaccccagattgccatgttctgtggcagactgaacatgcacatgaatgtccagaatgggaagtgggattcagatccatcagggaccaaaacctgcattgataccaaggaaggcatcctgcagtattgccaagaagtctaccctgaactgcagatcaccaatgtggtagaagccaaccaaccagtgaccatccagaactggtgcaagcggggccgcaagcagtgcaagacccatccccactttgtgattccctaccgctgcttagttggtgagtttgtaagtgatgcccttctcgttcctgacaagtgcaaattcttacaccaggagaggatggatgtttgcgaaactcatcttcactggcacaccgtcgccaaagagacatgcagtgagaagagtaccaacttgcatgactacggcatgttgctgccctgcggaattgacaagttccgaggggtagagtttgtgtgttgcccactggctgaagaaagtgacaatgtggattctgctgatgcggaggaggatgactcggatgtctggtggggcggagcagacacagactatgcagatgggagtgaagacaaagtagtagaagtagcagaggaggaagaagtggctgaggtggaagaagaagaagccgatgatgacgaggacgatgaggatggtgatgaggtagaggaagaggctgaggaaccctacgaagaagccacagagagaaccaccagcattgccaccaccaccaccaccaccacagagtctgtggaagaggtggttcgagaggtgtgctctgaacaagccgagacggggccgtgccgagcaatgatctcccgctggtactttgatgtgactgaagggaagtgtgccccattcttttacggcggatgtggcggcaaccggaacaactttgacacagaagagtactgcatggccgtgtgtggcagcgccattcctacaacagcagccagtacccctgatgccgttgacaagtatctcgagacacctggggatgagaatgaacatgcccatttccagaaagccaaagagaggcttgaggccaagcaccgagagagaatgtcccaggtcatgagagaatgggaagaggcagaacgtcaagcaaagaacttgcctaaagctgataagaaggcagttatccagcatttccaggagaaagtggaatctttggaacaggaagcagccaacgagagacagcagctggtggagacacacatggccagagtggaagccatgctcaatgaccgccgccgcctggccctggagaactacatcaccgctctgcaggctgttcctcctcggcctcgtcacgtgttcaatatgctaaagaagtatgtccgcgcagaacagaaggacagacagcacaccctaaagcatttcgagcatgtgcgcatggtggatcccaagaaagccgctcagatccggtcccaggttatgacacacctccgtgtgatttatgagcgcatgaatcagtctctctccctgctctacaacgtgcctgcagtggccgaggagattcaggatgaagttgatgagctgcttcagaaagagcaaaactattcagatgacgtcttggccaacatgattagtgaaccaaggatcagttacggaaacgatgctctcatgccatctttgaccgaaacgaaaaccaccgtggagctccttcccgtgaatggagagttcagcctggacgatctccagccgtggcattcttttggggctgactctgtgccagccaacacagaaaacgaagttgagcctgttgatgcccgccctgctgccgaccgaggactgaccactcgaccaggttctgggttgacaaatatcaagacggaggagatctctgaagtgaagatggatgcagaattccgacatgactcaggatatgaagttcatcatcaaaaattggtgttctttgcagaagatgtgggttcaaacaaaggtgcaatcattggactcatggtgggcggtgttgtcatagcgacagtgatcgtcatcaccttggtgatgctgaagaagaaacagtacacatccattcatcatggtgtggtggaggttgacgccgctgtcaccccagaggagcgccacctgtccaagatgcagcagaacggctacgaaaatccaacctacaagttctttgagcagatgcagaactagacccccgccacagcagcctctgaagttggacagcaaaaccattgcttcactacccatcggtgtccatttatagaataatgtgggaagaaacaaacccgttttatgatttactcattatcgccttttgacagctgtgctgtaacacaagtagatgcctgaacttgaattaatccacacatcagtaatgtattctatctctctttacattttggtctctatactacattattaatgggttttgtgtactgtaaagaatttagctgtatcaaactagtgcatgaatagattctctcctgattatttatcacatagccccttagccagttgtatattattcttgtggtttgtgacccaattaagtcctactttacatatgctttaagaatcgatgggggatgcttcatgtgaacgtgggagttcagctgcttctcttgcctaagtattcctttcctgatcactatgcattttaaagttaaacatttttaagtatttcagatgctttagagagattttttttccatgactgcattttactgtacagattgctgcttctgctatatttgtgatataggaattaagaggatacacacgtttgtttcttcgtgcctgttttatgtgcacacattaggcattgagacttcaagcttttctttttttgtccacgtatctttgggtctttgataaagaaaagaatccctgttcattgtaagcacttttacggggcgggtggggaggggtgctctgctggtcttcaattaccaagaattctccaaaacaattttctgcaggatgattgtacagaatcattgcttatgacatgatcgctttctacactgtattacataaataaattaaataaaataaccccgggcaagacttttctttgaaggatgactacagacattaaataatcgaagtaattttgggtggggagaagaggcagattcaattttctttaaccagtctgaagtttcatttatgatacaaaagaagatgaaaatggaagtggcaatataaggggatgaggaaggcatgcctggacaaacccttcttttaagatgtgtcttcaatttgtataaaatggtgttttcatgtaaataaatacattcttggaggagca

SEQ ID NO: 543 - DNA, 3529 bp, Homo sapiens
  source 1..3529: mol_type = genomic DNA
gtcagtttcctcggcagcggtaggcgagagcacgcggaggagcgtgcgcgggggccccgggagacggcggcggtggcggcgcgggcagagcaaggacgcggcggatcccactcgcacagcagcgcactcggtgccccgcgcagggtcgcgatgctgcccggtttggcactgctcctgctggccgcctggacggctcgggcgctggaggtacccactgatggtaatgctggcctgctggctgaaccccagattgccatgttctgtggcagactgaacatgcacatgaatgtccagaatgggaagtgggattcagatccatcagggaccaaaacctgcattgataccaaggaaggcatcctgcagtattgccaagaagtctaccctgaactgcagatcaccaatgtggtagaagccaaccaaccagtgaccatccagaactggtgcaagcggggccgcaagcagtgcaagacccatccccactttgtgattccctaccgctgcttagttggtgagtttgtaagtgatgcccttctcgttcctgacaagtgcaaattcttacaccaggagaggatggatgtttgcgaaactcatcttcactggcacaccgtcgccaaagagacatgcagtgagaagagtaccaacttgcatgactacggcatgttgctgccctgcggaattgacaagttccgaggggtagagtttgtgtgttgcccactggctgaagaaagtgacaatgtggattctgctgatgcggaggaggatgactcggatgtctggtggggcggagcagacacagactatgcagatgggagtgaagacaaagtagtagaagtagcagaggaggaagaagtggctgaggtggaagaagaagaagccgatgatgacgaggacgatgaggatggtgatgaggtagaggaagaggctgaggaaccctacgaagaagccacagagagaaccaccagcattgccaccaccaccaccaccaccacagagtctgtggaagaggtggttcgagaggtgtgctctgaacaagccgagacggggccgtgccgagcaatgatctcccgctggtactttgatgtgactgaagggaagtgtgccccattcttttacggcggatgtggcggcaaccggaacaactttgacacagaagagtactgcatggccgtgtgtggcagcgccatgtcccaaagtttactcaagactacccaggaacctcttgcccgagatcctgttaaacttcctacaacagcagccagtacccctgatgccgttgacaagtatctcgagacacctggggatgagaatgaacatgcccatttccagaaagccaaagagaggcttgaggccaagcaccgagagagaatgtcccaggtcatgagagaatgggaagaggcagaacgtcaagcaaagaacttgcctaaagctgataagaaggcagttatccagcatttccaggagaaagtggaatctttggaacaggaagcagccaacgagagacagcagctggtggagacacacatggccagagtggaagccatgctcaatgaccgccgccgcctggccctggagaactacatcaccgctctgcaggctgttcctcctcggcctcgtcacgtgttcaatatgctaaagaagtatgtccgcgcagaacagaaggacagacagcacaccctaaagcatttcgagcatgtgcgcatggtggatcccaagaaagccgctcagatccggtcccaggttatgacacacctccgtgtgatttatgagcgcatgaatcagtctctctccctgctctacaacgtgcctgcagtggccgaggagattcaggatgaagttgatgagctgcttcagaaagagcaaaactattcagatgacgtcttggccaacatgattagtgaaccaaggatcagttacggaaacgatgctctcatgccatctttgaccgaaacgaaaaccaccgtggagctccttcccgtgaatggagagttcagcctggacgatctccagccgtggcattcttttggggctgactctgtgccagccaacacagaaaacgaaggttctgggttgacaaatatcaagacggaggagatctctgaagtgaagatggatgcagaattccgacatgactcaggatatgaagttcatcatcaaaaattggtgttctttgcagaagatgtgggttcaaacaaaggtgcaatcattggactcatggtgggcggtgttgtcatagcgacagtgatcgtcatcaccttggtgatgctgaagaagaaacagtacacatccattcatcatggtgtggtggaggttgacgccgctgtcaccccagaggagcgccacctgtccaagatgcagcagaacggctacgaaaatccaacctacaagttctttgagcagatgcagaactagacccccgccacagcagcctctgaagttggacagcaaaaccattgcttcactacccatcggtgtccatttatagaataatgtgggaagaaacaaacccgttttatgatttactcattatcgccttttgacagctgtgctgtaacacaagtagatgcctgaacttgaattaatccacacatcagtaatgtattctatctctctttacattttggtctctatactacattattaatgggttttgtgtactgtaaagaatttagctgtatcaaactagtgcatgaatagattctctcctgattatttatcacatagccccttagccagttgtatattattcttgtggtttgtgacccaattaagtcctactttacatatgctttaagaatcgatgggggatgcttcatgtgaacgtgggagttcagctgcttctcttgcctaagtattcctttcctgatcactatgcattttaaagttaaacatttttaagtatttcagatgctttagagagattttttttccatgactgcattttactgtacagattgctgcttctgctatatttgtgatataggaattaagaggatacacacgtttgtttcttcgtgcctgttttatgtgcacacattaggcattgagacttcaagcttttctttttttgtccacgtatctttgggtctttgataaagaaaagaatccctgttcattgtaagcacttttacggggcgggtggggaggggtgctctgctggtcttcaattaccaagaattctccaaaacaattttctgcaggatgattgtacagaatcattgcttatgacatgatcgctttctacactgtattacataaataaattaaataaaataaccccgggcaagacttttctttgaaggatgactacagacattaaataatcgaagtaattttgggtggggagaagaggcagattcaattttctttaaccagtctgaagtttcatttatgatacaaaagaagatgaaaatggaagtggcaatataaggggatgaggaaggcatgcctggacaaacccttcttttaagatgtgtcttcaatttgtataaaatggtgttttcatgtaaataaatacattcttggaggagca

SEQ ID NO: 544 - DNA, 3583 bp, Homo sapiens
  source 1..3583: mol_type = genomic DNA
gtcagtttcctcggcagcggtaggcgagagcacgcggaggagcgtgcgcgggggccccgggagacggcggcggtggcggcgcgggcagagcaaggacgcggcggatcccactcgcacagcagcgcactcggtgccccgcgcagggtcgcgatgctgcccggtttggcactgctcctgctggccgcctggacggctcgggcgctggaggtacccactgatggtaatgctggcctgctggctgaaccccagattgccatgttctgtggcagactgaacatgcacatgaatgtccagaatgggaagtgggattcagatccatcagggaccaaaacctgcattgataccaaggaaggcatcctgcagtattgccaagaagtctaccctgaactgcagatcaccaatgtggtagaagccaaccaaccagtgaccatccagaactggtgcaagcggggccgcaagcagtgcaagacccatccccactttgtgattccctaccgctgcttagttggtgagtttgtaagtgatgcccttctcgttcctgacaagtgcaaattcttacaccaggagaggatggatgtttgcgaaactcatcttcactggcacaccgtcgccaaagagacatgcagtgagaagagtaccaacttgcatgactacggcatgttgctgccctgcggaattgacaagttccgaggggtagagtttgtgtgttgcccactggctgaagaaagtgacaatgtggattctgctgatgcggaggaggatgactcggatgtctggtggggcggagcagacacagactatgcagatgggagtgaagacaaagtagtagaagtagcagaggaggaagaagtggctgaggtggaagaagaagaagccgatgatgacgaggacgatgaggatggtgatgaggtagaggaagaggctgaggaaccctacgaagaagccacagagagaaccaccagcattgccaccaccaccaccaccaccacagagtctgtggaagaggtggttcgagaggtgtgctctgaacaagccgagacggggccgtgccgagcaatgatctcccgctggtactttgatgtgactgaagggaagtgtgccccattcttttacggcggatgtggcggcaaccggaacaactttgacacagaagagtactgcatggccgtgtgtggcagcgccatgtcccaaagtttactcaagactacccaggaacctcttgcccgagatcctgttaaacttcctacaacagcagccagtacccctgatgccgttgacaagtatctcgagacacctggggatgagaatgaacatgcccatttccagaaagccaaagagaggcttgaggccaagcaccgagagagaatgtcccaggtcatgagagaatgggaagaggcagaacgtcaagcaaagaacttgcctaaagctgataagaaggcagttatccagcatttccaggagaaagtggaatctttggaacaggaagcagccaacgagagacagcagctggtggagacacacatggccagagtggaagccatgctcaatgaccgccgccgcctggccctggagaactacatcaccgctctgcaggctgttcctcctcggcctcgtcacgtgttcaatatgctaaagaagtatgtccgcgcagaacagaaggacagacagcacaccctaaagcatttcgagcatgtgcgcatggtggatcccaagaaagccgctcagatccggtcccaggttatgacacacctccgtgtgatttatgagcgcatgaatcagtctctctccctgctctacaacgtgcctgcagtggccgaggagattcaggatgaagttgatgagctgcttcagaaagagcaaaactattcagatgacgtcttggccaacatgattagtgaaccaaggatcagttacggaaacgatgctctcatgccatctttgaccgaaacgaaaaccaccgtggagctccttcccgtgaatggagagttcagcctggacgatctccagccgtggcattcttttggggctgactctgtgccagccaacacagaaaacgaagttgagcctgttgatgcccgccctgctgccgaccgaggactgaccactcgaccaggttctgggttgacaaatatcaagacggaggagatctctgaagtgaagatggatgcagaattccgacatgactcaggatatgaagttcatcatcaaaaattggtgttctttgcagaagatgtgggttcaaacaaaggtgcaatcattggactcatggtgggcggtgttgtcatagcgacagtgatcgtcatcaccttggtgatgctgaagaagaaacagtacacatccattcatcatggtgtggtggaggttgacgccgctgtcaccccagaggagcgccacctgtccaagatgcagcagaacggctacgaaaatccaacctacaagttctttgagcagatgcagaactagacccccgccacagcagcctctgaagttggacagcaaaaccattgcttcactacccatcggtgtccatttatagaataatgtgggaagaaacaaacccgttttatgatttactcattatcgccttttgacagctgtgctgtaacacaagtagatgcctgaacttgaattaatccacacatcagtaatgtattctatctctctttacattttggtctctatactacattattaatgggttttgtgtactgtaaagaatttagctgtatcaaactagtgcatgaatagattctctcctgattatttatcacatagccccttagccagttgtatattattcttgtggtttgtgacccaattaagtcctactttacatatgctttaagaatcgatgggggatgcttcatgtgaacgtgggagttcagctgcttctcttgcctaagtattcctttcctgatcactatgcattttaaagttaaacatttttaagtatttcagatgctttagagagattttttttccatgactgcattttactgtacagattgctgcttctgctatatttgtgatataggaattaagaggatacacacgtttgtttcttcgtgcctgttttatgtgcacacattaggcattgagacttcaagcttttctttttttgtccacgtatctttgggtctttgataaagaaaagaatccctgttcattgtaagcacttttacggggcgggtggggaggggtgctctgctggtcttcaattaccaagaattctccaaaacaattttctgcaggatgattgtacagaatcattgcttatgacatgatcgctttctacactgtattacataaataaattaaataaaataaccccgggcaagacttttctttgaaggatgactacagacattaaataatcgaagtaattttgggtggggagaagaggcagattcaattttctttaaccagtctgaagtttcatttatgatacaaaagaagatgaaaatggaagtggcaatataaggggatgaggaaggcatgcctggacaaacccttcttttaagatgtgtcttcaatttgtataaaatggtgttttcatgtaaataaatacattcttggaggagca

SEQ ID NO: 545 - DNA, 3572 bp, Homo sapiens
  source 1..3572: mol_type = genomic DNA
aaatagcacagccttgctgtgcgtggtagaagttgggttagtgttgacatgctgttgactcaccctcccgaggatggaagctctggcctgggtcaagttgtggtcactgcagttaacagtttgttgatctcagggagtattccacagttgctgatgtaattgacaatgattggagccagctcttccccagattcaaatggaccaattagaggacttgttggttctgtttatcaactatgtacccactgatggtaatgctggcctgctggctgaaccccagattgccatgttctgtggcagactgaacatgcacatgaatgtccagaatgggaagtgggattcagatccatcagggaccaaaacctgcattgataccaaggaaggcatcctgcagtattgccaagaagtctaccctgaactgcagatcaccaatgtggtagaagccaaccaaccagtgaccatccagaactggtgcaagcggggccgcaagcagtgcaagacccatccccactttgtgattccctaccgctgcttagttggtgagtttgtaagtgatgcccttctcgttcctgacaagtgcaaattcttacaccaggagaggatggatgtttgcgaaactcatcttcactggcacaccgtcgccaaagagacatgcagtgagaagagtaccaacttgcatgactacggcatgttgctgccctgcggaattgacaagttccgaggggtagagtttgtgtgttgcccactggctgaagaaagtgacaatgtggattctgctgatgcggaggaggatgactcggatgtctggtggggcggagcagacacagactatgcagatgggagtgaagacaaagtagtagaagtagcagaggaggaagaagtggctgaggtggaagaagaagaagccgatgatgacgaggacgatgaggatggtgatgaggtagaggaagaggctgaggaaccctacgaagaagccacagagagaaccaccagcattgccaccaccaccaccaccaccacagagtctgtggaagaggtggttcgagaggtgtgctctgaacaagccgagacggggccgtgccgagcaatgatctcccgctggtactttgatgtgactgaagggaagtgtgccccattcttttacggcggatgtggcggcaaccggaacaactttgacacagaagagtactgcatggccgtgtgtggcagcgccattcctacaacagcagccagtacccctgatgccgttgacaagtatctcgagacacctggggatgagaatgaacatgcccatttccagaaagccaaagagaggcttgaggccaagcaccgagagagaatgtcccaggtcatgagagaatgggaagaggcagaacgtcaagcaaagaacttgcctaaagctgataagaaggcagttatccagcatttccaggagaaagtggaatctttggaacaggaagcagccaacgagagacagcagctggtggagacacacatggccagagtggaagccatgctcaatgaccgccgccgcctggccctggagaactacatcaccgctctgcaggctgttcctcctcggcctcgtcacgtgttcaatatgctaaagaagtatgtccgcgcagaacagaaggacagacagcacaccctaaagcatttcgagcatgtgcgcatggtggatcccaagaaagccgctcagatccggtcccaggttatgacacacctccgtgtgatttatgagcgcatgaatcagtctctctccctgctctacaacgtgcctgcagtggccgaggagattcaggatgaagttgatgagctgcttcagaaagagcaaaactattcagatgacgtcttggccaacatgattagtgaaccaaggatcagttacggaaacgatgctctcatgccatctttgaccgaaacgaaaaccaccgtggagctccttcccgtgaatggagagttcagcctggacgatctccagccgtggcattcttttggggctgactctgtgccagccaacacagaaaacgaagttgagcctgttgatgcccgccctgctgccgaccgaggactgaccactcgaccaggttctgggttgacaaatatcaagacggaggagatctctgaagtgaagatggatgcagaattccgacatgactcaggatatgaagttcatcatcaaaaattggtgttctttgcagaagatgtgggttcaaacaaaggtgcaatcattggactcatggtgggcggtgttgtcatagcgacagtgatcgtcatcaccttggtgatgctgaagaagaaacagtacacatccattcatcatggtgtggtggaggttgacgccgctgtcaccccagaggagcgccacctgtccaagatgcagcagaacggctacgaaaatccaacctacaagttctttgagcagatgcagaactagacccccgccacagcagcctctgaagttggacagcaaaaccattgcttcactacccatcggtgtccatttatagaataatgtgggaagaaacaaacccgttttatgatttactcattatcgccttttgacagctgtgctgtaacacaagtagatgcctgaacttgaattaatccacacatcagtaatgtattctatctctctttacattttggtctctatactacattattaatgggttttgtgtactgtaaagaatttagctgtatcaaactagtgcatgaatagattctctcctgattatttatcacatagccccttagccagttgtatattattcttgtggtttgtgacccaattaagtcctactttacatatgctttaagaatcgatgggggatgcttcatgtgaacgtgggagttcagctgcttctcttgcctaagtattcctttcctgatcactatgcattttaaagttaaacatttttaagtatttcagatgctttagagagattttttttccatgactgcattttactgtacagattgctgcttctgctatatttgtgatataggaattaagaggatacacacgtttgtttcttcgtgcctgttttatgtgcacacattaggcattgagacttcaagcttttctttttttgtccacgtatctttgggtctttgataaagaaaagaatccctgttcattgtaagcacttttacggggcgggtggggaggggtgctctgctggtcttcaattaccaagaattctccaaaacaattttctgcaggatgattgtacagaatcattgcttatgacatgatcgctttctacactgtattacataaataaattaaataaaataaccccgggcaagacttttctttgaaggatgactacagacattaaataatcgaagtaattttgggtggggagaagaggcagattcaattttctttaaccagtctgaagtttcatttatgatacaaaagaagatgaaaatggaagtggcaatataaggggatgaggaaggcatgcctggacaaacccttcttttaagatgtgtcttcaatttgtataaaatggtgttttcatgtaaataaatacattcttggaggagcaaaaaaaaaaaaaaaa

SEQ ID NO: 546 - DNA, 13051 bp, Homo sapiens
  source 1..13051: mol_type = genomic DNA
accatagagtgaggcgaggatgaagccgagaggatactgcagaggtctctggtgcatgtgtgtatgtgtgcgtttgtgtgtgtttgtgtgtctgtgtgttctgccccagtgagactgcagcccttgtaaatactttgacaccttttgcaagaaggaatctgaacaattgcaactgaaggcacattgttatcatctcgtctttgggtgatgctgttcctcactgcagatggataattttccttttaatcagaacagcataagaattatttctgagtggaggtgaggcttgtccaaatgtctttgctatcatggatttcctgactcctacctgtttgaggaatttcatatgcagaataaatggtaattaaaatgtgcaggatgacaagatggagcaaacagtgcttgtaccaccaggacctgacagcttcaacttcttcaccagagaatctcttgcggctattgaaagacgcattgcagaagaaaaggcaaagaatcccaaaccagacaaaaaagatgacgacgaaaatggcccaaagccaaatagtgacttggaagctggaaagaaccttccatttatttatggagacattcctccagagatggtgtcagagcccctggaggacctggacccctactatatcaataagaaaacttttatagtattgaataaagggaaggccatcttccggttcagtgccacctctgccctgtacattttaactcccttcaatcctcttaggaaaatagctattaagattttggtacattcattattcagcatgctaattatgtgcactattttgacaaactgtgtgtttatgacaatgagtaaccctcctgattggacaaagaatgtagaatacaccttcacaggaatatatacttttgaatcacttataaaaattattgcaaggggattctgtttagaagattttactttccttcgggatccatggaactggctcgatttcactgtcattacatttgcgtacgtcacagagtttgtggacctgggcaatgtctcggcattgagaacattcagagttctccgagcattgaagacgatttcagtcattccaggcctgaaaaccattgtgggagccctgatccagtctgtgaagaagctctcagatgtaatgatcctgactgtgttctgtctgagcgtatttgctctaattgggctgcagctgttcatgggcaacctgaggaataaatgtatacaatggcctcccaccaatgcttccttggaggaacatagtatagaaaagaatataactgtgaattataatggtacacttataaatgaaactgtctttgagtttgactggaagtcatatattcaagattcaagatatcattatttcctggagggttttttagatgcactactatgtggaaatagctctgatgcaggccaatgtccagagggatatatgtgtgtgaaagctggtagaaatcccaattatggctacacaagctttgataccttcagttgggcttttttgtccttgtttcgactaatgactcaggacttctgggaaaatctttatcaactgacattacgtgctgctgggaaaacgtacatgatattttttgtattggtcattttcttgggctcattctacctaataaatttgatcctggctgtggtggccatggcctacgaggaacagaatcaggccaccttggaagaagcagaacagaaagaggccgaatttcagcagatgattgaacagcttaaaaagcaacaggaggcagctcagcaggcagcaacggcaactgcctcagaacattccagagagcccagtgcagcaggcaggctctcagacagctcatctgaagcctctaagttgagttccaagagtgctaaggaaagaagaaatcggaggaagaaaagaaaacagaaagagcagtctggtggggaagagaaagatgaggatgaattccaaaaatctgaatctgaggacagcatcaggaggaaaggttttcgcttctccattgaagggaaccgattgacatatgaaaagaggtactcctccccacaccagtctttgttgagcatccgtggctccctattttcaccaaggcgaaatagcagaacaagccttttcagctttagagggcgagcaaaggatgtgggatctgagaacgacttcgcagatgatgagcacagcacctttgaggataacgagagccgtagagattccttgtttgtgccccgacgacacggagagagacgcaacagcaacctgagtcagaccagtaggtcatcccggatgctggcagtgtttccagcgaatgggaagatgcacagcactgtggattgcaatggtgtggtttccttggttggtggaccttcagttcctacatcgcctgttggacagcttctgccagagggaacaaccactgaaactgaaatgagaaagagaaggtcaagttctttccacgtttccatggactttctagaagatccttcccaaaggcaacgagcaatgagtatagccagcattctaacaaatacagtagaagaacttgaagaatccaggcagaaatgcccaccctgttggtataaattttccaacatattcttaatctgggactgttctccatattggttaaaagtgaaacatgttgtcaacctggttgtgatggacccatttgttgacctggccatcaccatctgtattgtcttaaatactcttttcatggccatggagcactatccaatgacggaccatttcaataatgtgcttacagtaggaaacttggttttcactgggatctttacagcagaaatgtttctgaaaattattgccatggatccttactattatttccaagaaggctggaatatctttgacggttttattgtgacgcttagcctggtagaacttggactcgccaatgtggaaggattatctgttctccgttcatttcgattgctgcgagttttcaagttggcaaaatcttggccaacgttaaatatgctaataaagatcatcggcaattccgtgggggctctgggaaatttaaccctcgtcttggccatcatcgtcttcatttttgccgtggtcggcatgcagctctttggtaaaagctacaaagattgtgtctgcaagatcgccagtgattgtcaactcccacgctggcacatgaatgacttcttccactccttcctgattgtgttccgcgtgctgtgtggggagtggatagagaccatgtgggactgtatggaggttgctggtcaagccatgtgccttactgtcttcatgatggtcatggtgattggaaacctagtggtcctgaatctctttctggccttgcttctgagctcatttagtgcagacaaccttgcagccactgatgatgataatgaaatgaataatctccaaattgctgtggataggatgcacaaaggagtagcttatgtgaaaagaaaaatatatgaatttattcaacagtccttcattaggaaacaaaagattttagatgaaattaaaccacttgatgatctaaacaacaagaaagacagttgtatgtccaatcatacagcagaaattgggaaagatcttgactatcttaaagatgtaaatggaactacaagtggtataggaactggcagcagtgttgaaaaatacattattgatgaaagtgattacatgtcattcataaacaaccccagtcttactgtgactgtaccaattgctgtaggagaatctgactttgaaaatttaaacacggaagactttagtagtgaatcggatctggaagaaagcaaagagaaactgaatgaaagcagtagctcatcagaaggtagcactgtggacatcggcgcacctgtagaagaacagcccgtagtggaacctgaagaaactcttgaaccagaagcttgtttcactgaaggctgtgtacaaagattcaagtgttgtcaaatcaatgtggaagaaggcagaggaaaacaatggtggaacctgagaaggacgtgtttccgaatagttgaacataactggtttgagaccttcattgttttcatgattctccttagtagtggtgctctggcatttgaagatatatatattgatcagcgaaagacgattaagacgatgttggaatatgctgacaaggttttcacttacattttcattctggaaatgcttctaaaatgggtggcatatggctatcaaacatatttcaccaatgcctggtgttggctggacttcttaattgttgatgtttcattggtcagtttaacagcaaatgccttgggttactcagaacttggagccatcaaatctctcaggacactaagagctctgagacctctaagagccttatctcgatttgaagggatgagggataatcttgctccaacttggatggggtggagcgctggttcctcccctgagccctttattatgggtggttgtgaatgcccttttaggagcaattccatccatcatgaatgtgcttctggtttgtcttatattctggctaattttcagcatcatgggcgtaaatttgtttgctggcaaattctaccactgtattaacaccacaactggtgacaggtttgacatcgaagacgtgaataatcatactgattgcctaaaactaatagaaagaaatgagactgctcgatggaaaaatgtgaaagtaaactttgataatgtaggatttgggtatctctctttgcttcaagttgccacattcaaaggatggatggatataatgtatgcagcagttgattccagaaatgtggaactccagcctaagtatgaagaaagtctgtacatgtatctttactttgttattttcatcatctttgggtccttcttcaccttgaacctgtttattggtgtcatcatagataatttcaaccagcagaaaaagaagtttggaggtcaagacatctttatgacagaagaacagaagaaatactataatgcaatgaaaaaattaggatcgaaaaaaccgcaaaagcctatacctcgaccaggaaacaaatttcaaggaatggtctttgacttcgtaaccagacaagtttttgacataagcatcatgattctcatctgtcttaacatggtcacaatgatggtggaaacagatgaccagagtgaatatgtgactaccattttgtcacgcatcaatctggtgttcattgtgctatttactggagagtgtgtactgaaactcatctctctacgccattattattttaccattggatggaatatttttgattttgtggttgtcattctctccattgtaggtatgtttcttgccgagctgatagaaaagtatttcgtgtcccctaccctgttccgagtgatccgtcttgctaggattggccgaatcctacgtctgatcaaaggagcaaaggggatccgcacgctgctctttgctttgatgatgtcccttcctgcgttgtttaacatcggcctcctactcttcctagtcatgttcatctacgccatctttgggatgtccaactttgcctatgttaagagggaagttgggatcgatgacatgttcaactttgagacctttggcaacagcatgatctgcctattccaaattacaacctctgctggctgggatggattgctagcacccattctcaacagtaagccacccgactgtgaccctaataaagttaaccctggaagctcagttaagggagactgtgggaacccatctgttggaattttcttttttgtcagttacatcatcatatccttcctggttgtggtgaacatgtacatcgcggtcatcctggagaacttcagtgttgctactgaagaaagtgcagagcctctgagtgaggatgactttgagatgttctatgaggtttgggagaagtttgatcccgatgcaactcagttcatggaatttgaaaaattatctcagtttgcagctgcgcttgaaccgcctctcaatctgccacaaccaaacaaactccagctcattgccatggatttgcccatggtgagtggtgaccggatccactgtcttgatatcttatttgcttttacaaagcgggttctaggagagagtggagagatggatgctctacgaatacagatggaagagcgattcatggcttccaatccttccaaggtctcctatcagccaatcactactactttaaaacgaaaacaagaggaagtatctgctgtcattattcagcgtgcttacagacgccaccttttaaagcgaactgtaaaacaagcttcctttacgtacaataaaaacaaaatcaaaggtggggctaatcttcttataaaagaagacatgataattgacagaataaatgaaaactctattacagaaaaaactgatctgaccatgtccactgcagcttgtccaccttcctatgaccgggtgacaaagccaattgtggaaaaacatgagcaagaaggcaaagatgaaaaagccaaagggaaataaatgaaaataaataaaaataattgggtgacaaattgtttacagcctgtgaaggtgatgtatttttatcaacaggactcctttaggaggtcaatgccaaactgactgtttttacacaaatctccttaaggtcagtgcctacaataagacagtgaccccttgtcagcaaactgtgactctgtgtaaaggggagatgaccttgacaggaggttactgttctcactaccagctgacactgctgaagataagatgcacaatggctagtcagactgtagggaccagtttcaaggggtgcaaacctgtgattttggggttgtttaacatgaaacactttagtgtagtaattgtatccactgtttgcatttcaactgccacatttgtcacatttttatggaatctgttagtggattcatctttttgttaatccatgtgtttattatatgtgactatttttgtaaacgaagtttctgttgagaaataggctaaggacctctataacaggtatgccacctggggggtatggcaaccacatggccctcccagctacacaaagtcgtggtttgcatgagggcatgctgcacttagagatcatgcatgagaaaaagtcacaagaaaaacaaattcttaaatttcaccatatttctgggaggggtaattgggtgataagtggaggtgctttgttgatcttgttttgcgaaatccagcccctagaccaagtagattatttgtgggtaggccagtaaatcttagcaggtgcaaacttcattcaaatgtttggagtcataaatgttatgtttctttttgttgtattaaaaaaaaaacctgaatagtgaatattgcccctcaccctccaccgccagaagactgaattgaccaaaattactctttataaatttctgctttttcctgcactttgtttagccatcttcggctctcagcaaggttgacactgtatatgttaatgaaatgctatttattatgtaaatagtcattttaccctgtggtgcacgtttgagcaaacaaataatgacctaagcacagtatttattgcatcaaatatgtaccacaagaaatgtagagtgcaagctttacacaggtaataaaatgtattctgtaccatttatagatagtttggatgctatcaatgcatgtttatattaccatgctgctgtatctggtttctctcactgctcagaatctcatttatgagaaaccatatgtcagtggtaaagtcaaggaaattgttcaacagatctcatttatttaagtcattaagcaatagtttgcagcactttaacagctttttggttatttttacattttaagtggataacatatggtatatagccagactgtacagacatgtttaaaaaaacacactgcttaacctattaaatatgtgtttagaattttataagcaaatataaatactgtaaaaagtcactttattttatttttcagcattatgtacataaatatgaagaggaaattatcttcaggttgatatcacaatcacttttcttactttctgtccatagtactttttcatgaaagaaatttgctaaataagacatgaaaacaagactgggtagttgtagatttctgctttttaaattacatttgctaattttagattatttcacaattttaaggagcaaaataggttcacgattcatatccaaattatgctttgcaattggaaaagggtttaaaattttatttatatttctggtagtacctgcactaactgaattgaaggtagtgcttatgttatttttgttctttttttctgacttcggtttatgttttcatttctttggagtaatgctgctctagattgttctaaatagaatgtgggcttcataatttttttttccacaaaaacagagtagtcaacttatatagtcaattacatcaggacattttgtgtttcttacagaagcaaaccataggctcctcttttccttaaaactacttagataaactgtattcgtgaactgcatgctggaaaatgctactattatgctaaataatgctaaccaacatttaaaatgtgcaaaactaataaagattacattttttattttattgtttgcccagtcactttttgttaacagaatattctaatgatatggagattttttacattacaaattgggggagaaggggagcgcgcgcgcacacacacacacacacacacacacacacacacacacacagaggcatacccacgttgacaacaaaacctagggtagatatgtcactggaggtagggggtaatgacctcccagaattacaagcagcaggtgtgttctctgttaggaggaagaactggtgtcagaggatagctagtgattctaggaggaagagaagtatggaagccagagtgatggtggatgaccccttgagctatgaaaagaaacccttaaatcatcatttaaaaatttagaattgccatgtgtgtaggatactgtgtttgctcctccagagccactctctctgcttctgcatcattctgtgtgtcccagaagggtgacttctacacattgcaaaaatgggctctcctacctttgagctcccaattggtttggccaatgagaagcaccagtgggaaagcaccagagagagaagattgacataggaatatttcttctccaattccttctttgctgggttggcactggactcattcctccccgaaaagtcatactccaatcagactgcccctcatacaactgaagctactttctctggggtcaggtaatcactcctccccttgctccttcaggtctgctgctgcattgagagtgcttttgtattccttgtagctttctcctaacattgctgacacttttgtaaatgtccccttcatgaaattcttctatatgcctcatttcagcatgccatctgtctcctgcctggctgacacaaggtgattcaacagctcatgaaagtcagcaggaagcaaagatgtgccttgcttcagcttggggtcttaatcttgctaacttttgcagataaagaaaaacagtaactgggggaaccacagtgaagtccagtgcagaattcacagatatcatggaaaggttactcgggtggtccagatagtaaaattaacagtctaaattaatctatctaaatttctgaggaacgagaagccttcccttgtcatcaggtgaagccagaagagggaatatagcctcaaccagaaaagggacagtaattaaaaggcttttcccatccttgtacaatggactgactttgcctcttcataacatcacaatcctaaagcaacacaacaattaattctgatatattagtagctgaaaaaaattcccatttccaactaaggtaggtcagaattataggataaaccctgcagactttttatactacccatccacgccattactcactgttacctttccaaatacaaagagaagaactggtaaaacataatcatataaatctccatattcattttgaaatatttggcatgatattttctgtgctaaaaagtaattattcttcaaagaatgatgaggtcatgtcagtaagacacaggaaccaactagaaggggcttcccactggccaaatctggggcaagttgagcatcaaaataaatgatagtaaaagattataattcattgaataagaatcagcaaatacatactgatgtaagtaaataaggaaaagtacaaatctgtttcttgcagttgaatgttaattaacaattgtagaagaaataacggagttagaaaaatcactatttggcaatcaccctaatgacaattgattcatacaagaatcatcaatgagtattaaaactcatgggtgaaagtttgatgaggaatagggtatttatagcatcttaaagtatctcttctctattaagtagaaaatttaaacagaagaaagtatactttggagaaatacagcagacaataccttcaaagatatcatcaattatgagaccaactgatactatgtgcctcctgataagatatactgaaagggccacattacttcttggtacacagtcaaaattttaaaaccagaatctaactacaaggaaaatcaaattgaggacactctataaaataagtggactgaactccttaaaaatgtcaatgtcatgaaagacaaagaaaggctaaagaattccatgaggtcaaagaactatgacaactaaacacaattctggatggaatatcaaattaaaaaataacagataaataatattattgggaaagttgaataaatttgaatatggactgtttattagttattagtattataatagtgttaattttcctaattttgttaagactagtgtgcctgttccatgaaaatagaaaatgttcttattctctgaaaatgcatgctaaagtatttaggggtgaatgcaacaatgtctgcagctcattcttgaatcagttcaaagaaaaatgagttacatttatatatatatgtatgtatgtaaacagacatagataaaagtatagatgtgtgtgtgtctttagaaaggggaggattttttttttttttttgctgtgtgttactgaagtgcctatgtctgcgtgttcacactatcatattttgtatgccctggactttataatttctaccttcaaaattagatctactgttggtaattaattcaatatatactggttttttaactactattctcatttcctagcagtaatcttcctgaaaagtcacagaaatgattacattccttgttcttcataataatcactgtttaattaaaataagaatattttagaaaagatctgcggcatagtggttaagaccccagtatttgatgctaaacagatctgatttggataacagaaggtggcactttgctgtttaagctggggaccagacactgtgggtataaatagtaattccaaacacagctccacagagcagcacccttatgacaaggttttcatatgtctatagttaagccagaaaattaagaataatgccataaatatttataaagctgaacatatccaagttaaagacctttatcctgaaattgtatcttttagattattttctaaagactaataccatttaatgtttaaatgttctttggaaatgatggtgagaatacgtgataatgggtcattggttttaatattttatttagccaagtggaaaattggcaacctggtgtcggtcctcccatttgtattttactggtgcatgaaatccaaaagtctagtaaccattgggacagacaactctactgcataagtttgtatgtttgtatatctgtatcacaaagcccagacactcgaactatataaacttgtcgcactaaagacagcaaatatgtctggtaattgcatattcttcatgtgtgcactggaatttcttattatataagaaaataaatgtgtttctaaaccaccatgaattgggtactgctgatagtactattcttcctggcacatggaaatatcccactgaggttgtcaatcaatattgatttaatcagtgtggcagcaaaggcactagaggaggaaaatactctagacaatcaagtatagatgggaaaattgcatcaccaagaaattcttaaaatcacaagtggataatttgcaatatcaattgattttactcaactgcttgagtcctttatcattccgttagaacactcctcatatttgcagataactcagcccctcacctcagcaacaagcaagaggacatcattataaacttcctcaatttctttcctatccagtgaaaaatatctaagtcccttttcccttcccttttccttcccttcccttcctttttctttccttccattctcttcctttttccttcctttttctttccttccattctcttcctttttccttcctttttcttactttacctccccctcctacctttccctttctcccttcctccctctctcccttccttcctctctccctctccttccttccttccttcaatccatacttttatatcttttcagagatcaatttttcccattcatttctacattctcagataccttgctccatgacttgttctacttctcttctatctttattctttccctcttgactgatcctttttgtctgcctttgcattttcaaaatcagtttttctaatcttaaaaaataactttgctcaaccctgatgcatctttattcactgtgtcattatctcattatttttaaaggttagtttctaaagccagggctctatactcactaccttcactcttggttaaaattaaaagaaatataggtcccagtgatatttatgggaaaatttgactgtgaataatcttgttgatataaacactttgggttttcaaaatgttatgctagctgttaactttcccagtaacattatgagggaagggctggaaaatacaaaaggtagacataggaaccgagaacaccacccctatggagccaagctatacatactctgtctctggttatcataaatacatctcctatattcaatgcttgcttagaaaggcatgatgtccacggagcaattcaattgttcactgtgatgggtttttttgttttctcctcatggaatgcaacttttatttat

SEQ ID NO: 547 - DNA, 12765 bp, Homo sapiens
  source 1..12765: mol_type = genomic DNA
aagtgtaggagacacactgctggcctgtggaaactcatggaactgttcctccagattaacacttcaggggttatggaagctggaggaagctgagcttttactacatcttttgggggaatttcatatgcagaataaatggtaattaaaatgtgcaggatgacaagatggagcaaacagtgcttgtaccaccaggacctgacagcttcaacttcttcaccagagaatctcttgcggctattgaaagacgcattgcagaagaaaaggcaaagaatcccaaaccagacaaaaaagatgacgacgaaaatggcccaaagccaaatagtgacttggaagctggaaagaaccttccatttatttatggagacattcctccagagatggtgtcagagcccctggaggacctggacccctactatatcaataagaaaacttttatagtattgaataaagggaaggccatcttccggttcagtgccacctctgccctgtacattttaactcccttcaatcctcttaggaaaatagctattaagattttggtacattcattattcagcatgctaattatgtgcactattttgacaaactgtgtgtttatgacaatgagtaaccctcctgattggacaaagaatgtagaatacaccttcacaggaatatatacttttgaatcacttataaaaattattgcaaggggattctgtttagaagattttactttccttcgggatccatggaactggctcgatttcactgtcattacatttgcgtacgtcacagagtttgtggacctgggcaatgtctcggcattgagaacattcagagttctccgagcattgaagacgatttcagtcattccaggcctgaaaaccattgtgggagccctgatccagtctgtgaagaagctctcagatgtaatgatcctgactgtgttctgtctgagcgtatttgctctaattgggctgcagctgttcatgggcaacctgaggaataaatgtatacaatggcctcccaccaatgcttccttggaggaacatagtatagaaaagaatataactgtgaattataatggtacacttataaatgaaactgtctttgagtttgactggaagtcatatattcaagattcaagatatcattatttcctggagggttttttagatgcactactatgtggaaatagctctgatgcaggccaatgtccagagggatatatgtgtgtgaaagctggtagaaatcccaattatggctacacaagctttgataccttcagttgggcttttttgtccttgtttcgactaatgactcaggacttctgggaaaatctttatcaactgacattacgtgctgctgggaaaacgtacatgatattttttgtattggtcattttcttgggctcattctacctaataaatttgatcctggctgtggtggccatggcctacgaggaacagaatcaggccaccttggaagaagcagaacagaaagaggccgaatttcagcagatgattgaacagcttaaaaagcaacaggaggcagctcagcaggcagcaacggcaactgcctcagaacattccagagagcccagtgcagcaggcaggctctcagacagctcatctgaagcctctaagttgagttccaagagtgctaaggaaagaagaaatcggaggaagaaaagaaaacagaaagagcagtctggtggggaagagaaagatgaggatgaattccaaaaatctgaatctgaggacagcatcaggaggaaaggttttcgcttctccattgaagggaaccgattgacatatgaaaagaggtactcctccccacaccagtctttgttgagcatccgtggctccctattttcaccaaggcgaaatagcagaacaagccttttcagctttagagggcgagcaaaggatgtgggatctgagaacgacttcgcagatgatgagcacagcacctttgaggataacgagagccgtagagattccttgtttgtgccccgacgacacggagagagacgcaacagcaacctgagtcagaccagtaggtcatcccggatgctggcagtgtttccagcgaatgggaagatgcacagcactgtggattgcaatggtgtggtttccttggttggtggaccttcagttcctacatcgcctgttggacagcttctgccagagggaacaaccactgaaactgaaatgagaaagagaaggtcaagttctttccacgtttccatggactttctagaagatccttcccaaaggcaacgagcaatgagtatagccagcattctaacaaatacagtagaagaacttgaagaatccaggcagaaatgcccaccctgttggtataaattttccaacatattcttaatctgggactgttctccatattggttaaaagtgaaacatgttgtcaacctggttgtgatggacccatttgttgacctggccatcaccatctgtattgtcttaaatactcttttcatggccatggagcactatccaatgacggaccatttcaataatgtgcttacagtaggaaacttggttttcactgggatctttacagcagaaatgtttctgaaaattattgccatggatccttactattatttccaagaaggctggaatatctttgacggttttattgtgacgcttagcctggtagaacttggactcgccaatgtggaaggattatctgttctccgttcatttcgattgctgcgagttttcaagttggcaaaatcttggccaacgttaaatatgctaataaagatcatcggcaattccgtgggggctctgggaaatttaaccctcgtcttggccatcatcgtcttcatttttgccgtggtcggcatgcagctctttggtaaaagctacaaagattgtgtctgcaagatcgccagtgattgtcaactcccacgctggcacatgaatgacttcttccactccttcctgattgtgttccgcgtgctgtgtggggagtggatagagaccatgtgggactgtatggaggttgctggtcaagccatgtgccttactgtcttcatgatggtcatggtgattggaaacctagtggtcctgaatctctttctggccttgcttctgagctcatttagtgcagacaaccttgcagccactgatgatgataatgaaatgaataatctccaaattgctgtggataggatgcacaaaggagtagcttatgtgaaaagaaaaatatatgaatttattcaacagtccttcattaggaaacaaaagattttagatgaaattaaaccacttgatgatctaaacaacaagaaagacagttgtatgtccaatcatacagcagaaattgggaaagatcttgactatcttaaagatgtaaatggaactacaagtggtataggaactggcagcagtgttgaaaaatacattattgatgaaagtgattacatgtcattcataaacaaccccagtcttactgtgactgtaccaattgctgtaggagaatctgactttgaaaatttaaacacggaagactttagtagtgaatcggatctggaagaaagcaaagagaaactgaatgaaagcagtagctcatcagaaggtagcactgtggacatcggcgcacctgtagaagaacagcccgtagtggaacctgaagaaactcttgaaccagaagcttgtttcactgaaggctgtgtacaaagattcaagtgttgtcaaatcaatgtggaagaaggcagaggaaaacaatggtggaacctgagaaggacgtgtttccgaatagttgaacataactggtttgagaccttcattgttttcatgattctccttagtagtggtgctctggcatttgaagatatatatattgatcagcgaaagacgattaagacgatgttggaatatgctgacaaggttttcacttacattttcattctggaaatgcttctaaaatgggtggcatatggctatcaaacatatttcaccaatgcctggtgttggctggacttcttaattgttgatgtttcattggtcagtttaacagcaaatgccttgggttactcagaacttggagccatcaaatctctcaggacactaagagctctgagacctctaagagccttatctcgatttgaagggatgagggtggttgtgaatgcccttttaggagcaattccatccatcatgaatgtgcttctggtttgtcttatattctggctaattttcagcatcatgggcgtaaatttgtttgctggcaaattctaccactgtattaacaccacaactggtgacaggtttgacatcgaagacgtgaataatcatactgattgcctaaaactaatagaaagaaatgagactgctcgatggaaaaatgtgaaagtaaactttgataatgtaggatttgggtatctctctttgcttcaagttgccacattcaaaggatggatggatataatgtatgcagcagttgattccagaaatgtggaactccagcctaagtatgaagaaagtctgtacatgtatctttactttgttattttcatcatctttgggtccttcttcaccttgaacctgtttattggtgtcatcatagataatttcaaccagcagaaaaagaagtttggaggtcaagacatctttatgacagaagaacagaagaaatactataatgcaatgaaaaaattaggatcgaaaaaaccgcaaaagcctatacctcgaccaggaaacaaatttcaaggaatggtctttgacttcgtaaccagacaagtttttgacataagcatcatgattctcatctgtcttaacatggtcacaatgatggtggaaacagatgaccagagtgaatatgtgactaccattttgtcacgcatcaatctggtgttcattgtgctatttactggagagtgtgtactgaaactcatctctctacgccattattattttaccattggatggaatatttttgattttgtggttgtcattctctccattgtaggtatgtttcttgccgagctgatagaaaagtatttcgtgtcccctaccctgttccgagtgatccgtcttgctaggattggccgaatcctacgtctgatcaaaggagcaaaggggatccgcacgctgctctttgctttgatgatgtcccttcctgcgttgtttaacatcggcctcctactcttcctagtcatgttcatctacgccatctttgggatgtccaactttgcctatgttaagagggaagttgggatcgatgacatgttcaactttgagacctttggcaacagcatgatctgcctattccaaattacaacctctgctggctgggatggattgctagcacccattctcaacagtaagccacccgactgtgaccctaataaagttaaccctggaagctcagttaagggagactgtgggaacccatctgttggaattttcttttttgtcagttacatcatcatatccttcctggttgtggtgaacatgtacatcgcggtcatcctggagaacttcagtgttgctactgaagaaagtgcagagcctctgagtgaggatgactttgagatgttctatgaggtttgggagaagtttgatcccgatgcaactcagttcatggaatttgaaaaattatctcagtttgcagctgcgcttgaaccgcctctcaatctgccacaaccaaacaaactccagctcattgccatggatttgcccatggtgagtggtgaccggatccactgtcttgatatcttatttgcttttacaaagcgggttctaggagagagtggagagatggatgctctacgaatacagatggaagagcgattcatggcttccaatccttccaaggtctcctatcagccaatcactactactttaaaacgaaaacaagaggaagtatctgctgtcattattcagcgtgcttacagacgccaccttttaaagcgaactgtaaaacaagcttcctttacgtacaataaaaacaaaatcaaaggtggggctaatcttcttataaaagaagacatgataattgacagaataaatgaaaactctattacagaaaaaactgatctgaccatgtccactgcagcttgtccaccttcctatgaccgggtgacaaagccaattgtggaaaaacatgagcaagaaggcaaagatgaaaaagccaaagggaaataaatgaaaataaataaaaataattgggtgacaaattgtttacagcctgtgaaggtgatgtatttttatcaacaggactcctttaggaggtcaatgccaaactgactgtttttacacaaatctccttaaggtcagtgcctacaataagacagtgaccccttgtcagcaaactgtgactctgtgtaaaggggagatgaccttgacaggaggttactgttctcactaccagctgacactgctgaagataagatgcacaatggctagtcagactgtagggaccagtttcaaggggtgcaaacctgtgattttggggttgtttaacatgaaacactttagtgtagtaattgtatccactgtttgcatttcaactgccacatttgtcacatttttatggaatctgttagtggattcatctttttgttaatccatgtgtttattatatgtgactatttttgtaaacgaagtttctgttgagaaataggctaaggacctctataacaggtatgccacctggggggtatggcaaccacatggccctcccagctacacaaagtcgtggtttgcatgagggcatgctgcacttagagatcatgcatgagaaaaagtcacaagaaaaacaaattcttaaatttcaccatatttctgggaggggtaattgggtgataagtggaggtgctttgttgatcttgttttgcgaaatccagcccctagaccaagtagattatttgtgggtaggccagtaaatcttagcaggtgcaaacttcattcaaatgtttggagtcataaatgttatgtttctttttgttgtattaaaaaaaaaacctgaatagtgaatattgcccctcaccctccaccgccagaagactgaattgaccaaaattactctttataaatttctgctttttcctgcactttgtttagccatcttcggctctcagcaaggttgacactgtatatgttaatgaaatgctatttattatgtaaatagtcattttaccctgtggtgcacgtttgagcaaacaaataatgacctaagcacagtatttattgcatcaaatatgtaccacaagaaatgtagagtgcaagctttacacaggtaataaaatgtattctgtaccatttatagatagtttggatgctatcaatgcatgtttatattaccatgctgctgtatctggtttctctcactgctcagaatctcatttatgagaaaccatatgtcagtggtaaagtcaaggaaattgttcaacagatctcatttatttaagtcattaagcaatagtttgcagcactttaacagctttttggttatttttacattttaagtggataacatatggtatatagccagactgtacagacatgtttaaaaaaacacactgcttaacctattaaatatgtgtttagaattttataagcaaatataaatactgtaaaaagtcactttattttatttttcagcattatgtacataaatatgaagaggaaattatcttcaggttgatatcacaatcacttttcttactttctgtccatagtactttttcatgaaagaaatttgctaaataagacatgaaaacaagactgggtagttgtagatttctgctttttaaattacatttgctaattttagattatttcacaattttaaggagcaaaataggttcacgattcatatccaaattatgctttgcaattggaaaagggtttaaaattttatttatatttctggtagtacctgcactaactgaattgaaggtagtgcttatgttatttttgttctttttttctgacttcggtttatgttttcatttctttggagtaatgctgctctagattgttctaaatagaatgtgggcttcataatttttttttccacaaaaacagagtagtcaacttatatagtcaattacatcaggacattttgtgtttcttacagaagcaaaccataggctcctcttttccttaaaactacttagataaactgtattcgtgaactgcatgctggaaaatgctactattatgctaaataatgctaaccaacatttaaaatgtgcaaaactaataaagattacattttttattttattgtttgcccagtcactttttgttaacagaatattctaatgatatggagattttttacattacaaattgggggagaaggggagcgcgcgcgcacacacacacacacacacacacacacacacacacacacagaggcatacccacgttgacaacaaaacctagggtagatatgtcactggaggtagggggtaatgacctcccagaattacaagcagcaggtgtgttctctgttaggaggaagaactggtgtcagaggatagctagtgattctaggaggaagagaagtatggaagccagagtgatggtggatgaccccttgagctatgaaaagaaacccttaaatcatcatttaaaaatttagaattgccatgtgtgtaggatactgtgtttgctcctccagagccactctctctgcttctgcatcattctgtgtgtcccagaagggtgacttctacacattgcaaaaatgggctctcctacctttgagctcccaattggtttggccaatgagaagcaccagtgggaaagcaccagagagagaagattgacataggaatatttcttctccaattccttctttgctgggttggcactggactcattcctccccgaaaagtcatactccaatcagactgcccctcatacaactgaagctactttctctggggtcaggtaatcactcctccccttgctccttcaggtctgctgctgcattgagagtgcttttgtattccttgtagctttctcctaacattgctgacacttttgtaaatgtccccttcatgaaattcttctatatgcctcatttcagcatgccatctgtctcctgcctggctgacacaaggtgattcaacagctcatgaaagtcagcaggaagcaaagatgtgccttgcttcagcttggggtcttaatcttgctaacttttgcagataaagaaaaacagtaactgggggaaccacagtgaagtccagtgcagaattcacagatatcatggaaaggttactcgggtggtccagatagtaaaattaacagtctaaattaatctatctaaatttctgaggaacgagaagccttcccttgtcatcaggtgaagccagaagagggaatatagcctcaaccagaaaagggacagtaattaaaaggcttttcccatccttgtacaatggactgactttgcctcttcataacatcacaatcctaaagcaacacaacaattaattctgatatattagtagctgaaaaaaattcccatttccaactaaggtaggtcagaattataggataaaccctgcagactttttatactacccatccacgccattactcactgttacctttccaaatacaaagagaagaactggtaaaacataatcatataaatctccatattcattttgaaatatttggcatgatattttctgtgctaaaaagtaattattcttcaaagaatgatgaggtcatgtcagtaagacacaggaaccaactagaaggggcttcccactggccaaatctggggcaagttgagcatcaaaataaatgatagtaaaagattataattcattgaataagaatcagcaaatacatactgatgtaagtaaataaggaaaagtacaaatctgtttcttgcagttgaatgttaattaacaattgtagaagaaataacggagttagaaaaatcactatttggcaatcaccctaatgacaattgattcatacaagaatcatcaatgagtattaaaactcatgggtgaaagtttgatgaggaatagggtatttatagcatcttaaagtatctcttctctattaagtagaaaatttaaacagaagaaagtatactttggagaaatacagcagacaataccttcaaagatatcatcaattatgagaccaactgatactatgtgcctcctgataagatatactgaaagggccacattacttcttggtacacagtcaaaattttaaaaccagaatctaactacaaggaaaatcaaattgaggacactctataaaataagtggactgaactccttaaaaatgtcaatgtcatgaaagacaaagaaaggctaaagaattccatgaggtcaaagaactatgacaactaaacacaattctggatggaatatcaaattaaaaaataacagataaataatattattgggaaagttgaataaatttgaatatggactgtttattagttattagtattataatagtgttaattttcctaattttgttaagactagtgtgcctgttccatgaaaatagaaaatgttcttattctctgaaaatgcatgctaaagtatttaggggtgaatgcaacaatgtctgcagctcattcttgaatcagttcaaagaaaaatgagttacatttatatatatatgtatgtatgtaaacagacatagataaaagtatagatgtgtgtgtgtctttagaaaggggaggattttttttttttttttgctgtgtgttactgaagtgcctatgtctgcgtgttcacactatcatattttgtatgccctggactttataatttctaccttcaaaattagatctactgttggtaattaattcaatatatactggttttttaactactattctcatttcctagcagtaatcttcctgaaaagtcacagaaatgattacattccttgttcttcataataatcactgtttaattaaaataagaatattttagaaaagatctgcggcatagtggttaagaccccagtatttgatgctaaacagatctgatttggataacagaaggtggcactttgctgtttaagctggggaccagacactgtgggtataaatagtaattccaaacacagctccacagagcagcacccttatgacaaggttttcatatgtctatagttaagccagaaaattaagaataatgccataaatatttataaagctgaacatatccaagttaaagacctttatcctgaaattgtatcttttagattattttctaaagactaataccatttaatgtttaaatgttctttggaaatgatggtgagaatacgtgataatgggtcattggttttaatattttatttagccaagtggaaaattggcaacctggtgtcggtcctcccatttgtattttactggtgcatgaaatccaaaagtctagtaaccattgggacagacaactctactgcataagtttgtatgtttgtatatctgtatcacaaagcccagacactcgaactatataaacttgtcgcactaaagacagcaaatatgtctggtaattgcatattcttcatgtgtgcactggaatttcttattatataagaaaataaatgtgtttctaaaccaccatgaattgggtactgctgatagtactattcttcctggcacatggaaatatcccactgaggttgtcaatcaatattgatttaatcagtgtggcagcaaaggcactagaggaggaaaatactctagacaatcaagtatagatgggaaaattgcatcaccaagaaattcttaaaatcacaagtggataatttgcaatatcaattgattttactcaactgcttgagtcctttatcattccgttagaacactcctcatatttgcagataactcagcccctcacctcagcaacaagcaagaggacatcattataaacttcctcaatttctttcctatccagtgaaaaatatctaagtcccttttcccttcccttttccttcccttcccttcctttttctttccttccattctcttcctttttccttcctttttctttccttccattctcttcctttttccttcctttttcttactttacctccccctcctacctttccctttctcccttcctccctctctcccttccttcctctctccctctccttccttccttccttcaatccatacttttatatcttttcagagatcaatttttcccattcatttctacattctcagataccttgctccatgacttgttctacttctcttctatctttattctttccctcttgactgatcctttttgtctgcctttgcattttcaaaatcagtttttctaatcttaaaaaataactttgctcaaccctgatgcatctttattcactgtgtcattatctcattatttttaaaggttagtttctaaagccagggctctatactcactaccttcactcttggttaaaattaaaagaaatataggtcccagtgatatttatgggaaaatttgactgtgaataatcttgttgatataaacactttgggttttcaaaatgttatgctagctgttaactttcccagtaacattatgagggaagggctggaaaatacaaaaggtagacataggaaccgagaacaccacccctatggagccaagctatacatactctgtctctggttatcataaatacatctcctatattcaatgcttgcttagaaaggcatgatgtccacggagcaattcaattgttcactgtgatgggtttttttgttttctcctcatggaatgcaacttttatttat

SEQ ID NO: 548 - DNA, 12806 bp, Homo sapiens
  source 1..12806: mol_type = genomic DNA
aagtgtaggagacacactgctggcctgtggaaactcatggaactgttcctccagattaacacttcaggggttatggaagctggaggaagctgagcttttactacatcttttgggggtttgggcaattatgaataaggctgctgtatacatccgtgtgcaggattttgtgtggacataagttttcaactcctttggttaaatcctaaggaatttcatatgcagaataaatggtaattaaaatgtgcaggatgacaagatggagcaaacagtgcttgtaccaccaggacctgacagcttcaacttcttcaccagagaatctcttgcggctattgaaagacgcattgcagaagaaaaggcaaagaatcccaaaccagacaaaaaagatgacgacgaaaatggcccaaagccaaatagtgacttggaagctggaaagaaccttccatttatttatggagacattcctccagagatggtgtcagagcccctggaggacctggacccctactatatcaataagaaaacttttatagtattgaataaagggaaggccatcttccggttcagtgccacctctgccctgtacattttaactcccttcaatcctcttaggaaaatagctattaagattttggtacattcattattcagcatgctaattatgtgcactattttgacaaactgtgtgtttatgacaatgagtaaccctcctgattggacaaagaatgtagaatacaccttcacaggaatatatacttttgaatcacttataaaaattattgcaaggggattctgtttagaagattttactttccttcgggatccatggaactggctcgatttcactgtcattacatttgcgtacgtcacagagtttgtggacctgggcaatgtctcggcattgagaacattcagagttctccgagcattgaagacgatttcagtcattccaggcctgaaaaccattgtgggagccctgatccagtctgtgaagaagctctcagatgtaatgatcctgactgtgttctgtctgagcgtatttgctctaattgggctgcagctgttcatgggcaacctgaggaataaatgtatacaatggcctcccaccaatgcttccttggaggaacatagtatagaaaagaatataactgtgaattataatggtacacttataaatgaaactgtctttgagtttgactggaagtcatatattcaagattcaagatatcattatttcctggagggttttttagatgcactactatgtggaaatagctctgatgcaggccaatgtccagagggatatatgtgtgtgaaagctggtagaaatcccaattatggctacacaagctttgataccttcagttgggcttttttgtccttgtttcgactaatgactcaggacttctgggaaaatctttatcaactgacattacgtgctgctgggaaaacgtacatgatattttttgtattggtcattttcttgggctcattctacctaataaatttgatcctggctgtggtggccatggcctacgaggaacagaatcaggccaccttggaagaagcagaacagaaagaggccgaatttcagcagatgattgaacagcttaaaaagcaacaggaggcagctcagcaggcagcaacggcaactgcctcagaacattccagagagcccagtgcagcaggcaggctctcagacagctcatctgaagcctctaagttgagttccaagagtgctaaggaaagaagaaatcggaggaagaaaagaaaacagaaagagcagtctggtggggaagagaaagatgaggatgaattccaaaaatctgaatctgaggacagcatcaggaggaaaggttttcgcttctccattgaagggaaccgattgacatatgaaaagaggtactcctccccacaccagtctttgttgagcatccgtggctccctattttcaccaaggcgaaatagcagaacaagccttttcagctttagagggcgagcaaaggatgtgggatctgagaacgacttcgcagatgatgagcacagcacctttgaggataacgagagccgtagagattccttgtttgtgccccgacgacacggagagagacgcaacagcaacctgagtcagaccagtaggtcatcccggatgctggcagtgtttccagcgaatgggaagatgcacagcactgtggattgcaatggtgtggtttccttgggaacaaccactgaaactgaaatgagaaagagaaggtcaagttctttccacgtttccatggactttctagaagatccttcccaaaggcaacgagcaatgagtatagccagcattctaacaaatacagtagaagaacttgaagaatccaggcagaaatgcccaccctgttggtataaattttccaacatattcttaatctgggactgttctccatattggttaaaagtgaaacatgttgtcaacctggttgtgatggacccatttgttgacctggccatcaccatctgtattgtcttaaatactcttttcatggccatggagcactatccaatgacggaccatttcaataatgtgcttacagtaggaaacttggttttcactgggatctttacagcagaaatgtttctgaaaattattgccatggatccttactattatttccaagaaggctggaatatctttgacggttttattgtgacgcttagcctggtagaacttggactcgccaatgtggaaggattatctgttctccgttcatttcgattgctgcgagttttcaagttggcaaaatcttggccaacgttaaatatgctaataaagatcatcggcaattccgtgggggctctgggaaatttaaccctcgtcttggccatcatcgtcttcatttttgccgtggtcggcatgcagctctttggtaaaagctacaaagattgtgtctgcaagatcgccagtgattgtcaactcccacgctggcacatgaatgacttcttccactccttcctgattgtgttccgcgtgctgtgtggggagtggatagagaccatgtgggactgtatggaggttgctggtcaagccatgtgccttactgtcttcatgatggtcatggtgattggaaacctagtggtcctgaatctctttctggccttgcttctgagctcatttagtgcagacaaccttgcagccactgatgatgataatgaaatgaataatctccaaattgctgtggataggatgcacaaaggagtagcttatgtgaaaagaaaaatatatgaatttattcaacagtccttcattaggaaacaaaagattttagatgaaattaaaccacttgatgatctaaacaacaagaaagacagttgtatgtccaatcatacagcagaaattgggaaagatcttgactatcttaaagatgtaaatggaactacaagtggtataggaactggcagcagtgttgaaaaatacattattgatgaaagtgattacatgtcattcataaacaaccccagtcttactgtgactgtaccaattgctgtaggagaatctgactttgaaaatttaaacacggaagactttagtagtgaatcggatctggaagaaagcaaagagaaactgaatgaaagcagtagctcatcagaaggtagcactgtggacatcggcgcacctgtagaagaacagcccgtagtggaacctgaagaaactcttgaaccagaagcttgtttcactgaaggctgtgtacaaagattcaagtgttgtcaaatcaatgtggaagaaggcagaggaaaacaatggtggaacctgagaaggacgtgtttccgaatagttgaacataactggtttgagaccttcattgttttcatgattctccttagtagtggtgctctggcatttgaagatatatatattgatcagcgaaagacgattaagacgatgttggaatatgctgacaaggttttcacttacattttcattctggaaatgcttctaaaatgggtggcatatggctatcaaacatatttcaccaatgcctggtgttggctggacttcttaattgttgatgtttcattggtcagtttaacagcaaatgccttgggttactcagaacttggagccatcaaatctctcaggacactaagagctctgagacctctaagagccttatctcgatttgaagggatgagggtggttgtgaatgcccttttaggagcaattccatccatcatgaatgtgcttctggtttgtcttatattctggctaattttcagcatcatgggcgtaaatttgtttgctggcaaattctaccactgtattaacaccacaactggtgacaggtttgacatcgaagacgtgaataatcatactgattgcctaaaactaatagaaagaaatgagactgctcgatggaaaaatgtgaaagtaaactttgataatgtaggatttgggtatctctctttgcttcaagttgccacattcaaaggatggatggatataatgtatgcagcagttgattccagaaatgtggaactccagcctaagtatgaagaaagtctgtacatgtatctttactttgttattttcatcatctttgggtccttcttcaccttgaacctgtttattggtgtcatcatagataatttcaaccagcagaaaaagaagtttggaggtcaagacatctttatgacagaagaacagaagaaatactataatgcaatgaaaaaattaggatcgaaaaaaccgcaaaagcctatacctcgaccaggaaacaaatttcaaggaatggtctttgacttcgtaaccagacaagtttttgacataagcatcatgattctcatctgtcttaacatggtcacaatgatggtggaaacagatgaccagagtgaatatgtgactaccattttgtcacgcatcaatctggtgttcattgtgctatttactggagagtgtgtactgaaactcatctctctacgccattattattttaccattggatggaatatttttgattttgtggttgtcattctctccattgtaggtatgtttcttgccgagctgatagaaaagtatttcgtgtcccctaccctgttccgagtgatccgtcttgctaggattggccgaatcctacgtctgatcaaaggagcaaaggggatccgcacgctgctctttgctttgatgatgtcccttcctgcgttgtttaacatcggcctcctactcttcctagtcatgttcatctacgccatctttgggatgtccaactttgcctatgttaagagggaagttgggatcgatgacatgttcaactttgagacctttggcaacagcatgatctgcctattccaaattacaacctctgctggctgggatggattgctagcacccattctcaacagtaagccacccgactgtgaccctaataaagttaaccctggaagctcagttaagggagactgtgggaacccatctgttggaattttcttttttgtcagttacatcatcatatccttcctggttgtggtgaacatgtacatcgcggtcatcctggagaacttcagtgttgctactgaagaaagtgcagagcctctgagtgaggatgactttgagatgttctatgaggtttgggagaagtttgatcccgatgcaactcagttcatggaatttgaaaaattatctcagtttgcagctgcgcttgaaccgcctctcaatctgccacaaccaaacaaactccagctcattgccatggatttgcccatggtgagtggtgaccggatccactgtcttgatatcttatttgcttttacaaagcgggttctaggagagagtggagagatggatgctctacgaatacagatggaagagcgattcatggcttccaatccttccaaggtctcctatcagccaatcactactactttaaaacgaaaacaagaggaagtatctgctgtcattattcagcgtgcttacagacgccaccttttaaagcgaactgtaaaacaagcttcctttacgtacaataaaaacaaaatcaaaggtggggctaatcttcttataaaagaagacatgataattgacagaataaatgaaaactctattacagaaaaaactgatctgaccatgtccactgcagcttgtccaccttcctatgaccgggtgacaaagccaattgtggaaaaacatgagcaagaaggcaaagatgaaaaagccaaagggaaataaatgaaaataaataaaaataattgggtgacaaattgtttacagcctgtgaaggtgatgtatttttatcaacaggactcctttaggaggtcaatgccaaactgactgtttttacacaaatctccttaaggtcagtgcctacaataagacagtgaccccttgtcagcaaactgtgactctgtgtaaaggggagatgaccttgacaggaggttactgttctcactaccagctgacactgctgaagataagatgcacaatggctagtcagactgtagggaccagtttcaaggggtgcaaacctgtgattttggggttgtttaacatgaaacactttagtgtagtaattgtatccactgtttgcatttcaactgccacatttgtcacatttttatggaatctgttagtggattcatctttttgttaatccatgtgtttattatatgtgactatttttgtaaacgaagtttctgttgagaaataggctaaggacctctataacaggtatgccacctggggggtatggcaaccacatggccctcccagctacacaaagtcgtggtttgcatgagggcatgctgcacttagagatcatgcatgagaaaaagtcacaagaaaaacaaattcttaaatttcaccatatttctgggaggggtaattgggtgataagtggaggtgctttgttgatcttgttttgcgaaatccagcccctagaccaagtagattatttgtgggtaggccagtaaatcttagcaggtgcaaacttcattcaaatgtttggagtcataaatgttatgtttctttttgttgtattaaaaaaaaaacctgaatagtgaatattgcccctcaccctccaccgccagaagactgaattgaccaaaattactctttataaatttctgctttttcctgcactttgtttagccatcttcggctctcagcaaggttgacactgtatatgttaatgaaatgctatttattatgtaaatagtcattttaccctgtggtgcacgtttgagcaaacaaataatgacctaagcacagtatttattgcatcaaatatgtaccacaagaaatgtagagtgcaagctttacacaggtaataaaatgtattctgtaccatttatagatagtttggatgctatcaatgcatgtttatattaccatgctgctgtatctggtttctctcactgctcagaatctcatttatgagaaaccatatgtcagtggtaaagtcaaggaaattgttcaacagatctcatttatttaagtcattaagcaatagtttgcagcactttaacagctttttggttatttttacattttaagtggataacatatggtatatagccagactgtacagacatgtttaaaaaaacacactgcttaacctattaaatatgtgtttagaattttataagcaaatataaatactgtaaaaagtcactttattttatttttcagcattatgtacataaatatgaagaggaaattatcttcaggttgatatcacaatcacttttcttactttctgtccatagtactttttcatgaaagaaatttgctaaataagacatgaaaacaagactgggtagttgtagatttctgctttttaaattacatttgctaattttagattatttcacaattttaaggagcaaaataggttcacgattcatatccaaattatgctttgcaattggaaaagggtttaaaattttatttatatttctggtagtacctgcactaactgaattgaaggtagtgcttatgttatttttgttctttttttctgacttcggtttatgttttcatttctttggagtaatgctgctctagattgttctaaatagaatgtgggcttcataatttttttttccacaaaaacagagtagtcaacttatatagtcaattacatcaggacattttgtgtttcttacagaagcaaaccataggctcctcttttccttaaaactacttagataaactgtattcgtgaactgcatgctggaaaatgctactattatgctaaataatgctaaccaacatttaaaatgtgcaaaactaataaagattacattttttattttattgtttgcccagtcactttttgttaacagaatattctaatgatatggagattttttacattacaaattgggggagaaggggagcgcgcgcgcacacacacacacacacacacacacacacacacacacacagaggcatacccacgttgacaacaaaacctagggtagatatgtcactggaggtagggggtaatgacctcccagaattacaagcagcaggtgtgttctctgttaggaggaagaactggtgtcagaggatagctagtgattctaggaggaagagaagtatggaagccagagtgatggtggatgaccccttgagctatgaaaagaaacccttaaatcatcatttaaaaatttagaattgccatgtgtgtaggatactgtgtttgctcctccagagccactctctctgcttctgcatcattctgtgtgtcccagaagggtgacttctacacattgcaaaaatgggctctcctacctttgagctcccaattggtttggccaatgagaagcaccagtgggaaagcaccagagagagaagattgacataggaatatttcttctccaattccttctttgctgggttggcactggactcattcctccccgaaaagtcatactccaatcagactgcccctcatacaactgaagctactttctctggggtcaggtaatcactcctccccttgctccttcaggtctgctgctgcattgagagtgcttttgtattccttgtagctttctcctaacattgctgacacttttgtaaatgtccccttcatgaaattcttctatatgcctcatttcagcatgccatctgtctcctgcctggctgacacaaggtgattcaacagctcatgaaagtcagcaggaagcaaagatgtgccttgcttcagcttggggtcttaatcttgctaacttttgcagataaagaaaaacagtaactgggggaaccacagtgaagtccagtgcagaattcacagatatcatggaaaggttactcgggtggtccagatagtaaaattaacagtctaaattaatctatctaaatttctgaggaacgagaagccttcccttgtcatcaggtgaagccagaagagggaatatagcctcaaccagaaaagggacagtaattaaaaggcttttcccatccttgtacaatggactgactttgcctcttcataacatcacaatcctaaagcaacacaacaattaattctgatatattagtagctgaaaaaaattcccatttccaactaaggtaggtcagaattataggataaaccctgcagactttttatactacccatccacgccattactcactgttacctttccaaatacaaagagaagaactggtaaaacataatcatataaatctccatattcattttgaaatatttggcatgatattttctgtgctaaaaagtaattattcttcaaagaatgatgaggtcatgtcagtaagacacaggaaccaactagaaggggcttcccactggccaaatctggggcaagttgagcatcaaaataaatgatagtaaaagattataattcattgaataagaatcagcaaatacatactgatgtaagtaaataaggaaaagtacaaatctgtttcttgcagttgaatgttaattaacaattgtagaagaaataacggagttagaaaaatcactatttggcaatcaccctaatgacaattgattcatacaagaatcatcaatgagtattaaaactcatgggtgaaagtttgatgaggaatagggtatttatagcatcttaaagtatctcttctctattaagtagaaaatttaaacagaagaaagtatactttggagaaatacagcagacaataccttcaaagatatcatcaattatgagaccaactgatactatgtgcctcctgataagatatactgaaagggccacattacttcttggtacacagtcaaaattttaaaaccagaatctaactacaaggaaaatcaaattgaggacactctataaaataagtggactgaactccttaaaaatgtcaatgtcatgaaagacaaagaaaggctaaagaattccatgaggtcaaagaactatgacaactaaacacaattctggatggaatatcaaattaaaaaataacagataaataatattattgggaaagttgaataaatttgaatatggactgtttattagttattagtattataatagtgttaattttcctaattttgttaagactagtgtgcctgttccatgaaaatagaaaatgttcttattctctgaaaatgcatgctaaagtatttaggggtgaatgcaacaatgtctgcagctcattcttgaatcagttcaaagaaaaatgagttacatttatatatatatgtatgtatgtaaacagacatagataaaagtatagatgtgtgtgtgtctttagaaaggggaggattttttttttttttttgctgtgtgttactgaagtgcctatgtctgcgtgttcacactatcatattttgtatgccctggactttataatttctaccttcaaaattagatctactgttggtaattaattcaatatatactggttttttaactactattctcatttcctagcagtaatcttcctgaaaagtcacagaaatgattacattccttgttcttcataataatcactgtttaattaaaataagaatattttagaaaagatctgcggcatagtggttaagaccccagtatttgatgctaaacagatctgatttggataacagaaggtggcactttgctgtttaagctggggaccagacactgtgggtataaatagtaattccaaacacagctccacagagcagcacccttatgacaaggttttcatatgtctatagttaagccagaaaattaagaataatgccataaatatttataaagctgaacatatccaagttaaagacctttatcctgaaattgtatcttttagattattttctaaagactaataccatttaatgtttaaatgttctttggaaatgatggtgagaatacgtgataatgggtcattggttttaatattttatttagccaagtggaaaattggcaacctggtgtcggtcctcccatttgtattttactggtgcatgaaatccaaaagtctagtaaccattgggacagacaactctactgcataagtttgtatgtttgtatatctgtatcacaaagcccagacactcgaactatataaacttgtcgcactaaagacagcaaatatgtctggtaattgcatattcttcatgtgtgcactggaatttcttattatataagaaaataaatgtgtttctaaaccaccatgaattgggtactgctgatagtactattcttcctggcacatggaaatatcccactgaggttgtcaatcaatattgatttaatcagtgtggcagcaaaggcactagaggaggaaaatactctagacaatcaagtatagatgggaaaattgcatcaccaagaaattcttaaaatcacaagtggataatttgcaatatcaattgattttactcaactgcttgagtcctttatcattccgttagaacactcctcatatttgcagataactcagcccctcacctcagcaacaagcaagaggacatcattataaacttcctcaatttctttcctatccagtgaaaaatatctaagtcccttttcccttcccttttccttcccttcccttcctttttctttccttccattctcttcctttttccttcctttttctttccttccattctcttcctttttccttcctttttcttactttacctccccctcctacctttccctttctcccttcctccctctctcccttccttcctctctccctctccttccttccttccttcaatccatacttttatatcttttcagagatcaatttttcccattcatttctacattctcagataccttgctccatgacttgttctacttctcttctatctttattctttccctcttgactgatcctttttgtctgcctttgcattttcaaaatcagtttttctaatcttaaaaaataactttgctcaaccctgatgcatctttattcactgtgtcattatctcattatttttaaaggttagtttctaaagccagggctctatactcactaccttcactcttggttaaaattaaaagaaatataggtcccagtgatatttatgggaaaatttgactgtgaataatcttgttgatataaacactttgggttttcaaaatgttatgctagctgttaactttcccagtaacattatgagggaagggctggaaaatacaaaaggtagacataggaaccgagaacaccacccctatggagccaagctatacatactctgtctctggttatcataaatacatctcctatattcaatgcttgcttagaaaggcatgatgtccacggagcaattcaattgttcactgtgatgggtttttttgttttctcctcatggaatgcaacttttatttat

SEQ ID NO: 549 - DNA, 12857 bp, Homo sapiens
  source 1..12857: mol_type = genomic DNA
aagtgtaggagacacactgctggcctgtggaaactcatggaactgttcctccagattaacacttcaggggttatggaagctggaggaagctgagcttttactacatcttttgggggtttgggcaattatgaataaggctgctgtatacatccgtgtgcaggattttgtgtggacataagttttcaactcctttggttaaatcctaaggaatttcatatgcagaataaatggtaattaaaatgtgcaggatgacaagatggagcaaacagtgcttgtaccaccaggacctgacagcttcaacttcttcaccagagaatctcttgcggctattgaaagacgcattgcagaagaaaaggcaaagaatcccaaaccagacaaaaaagatgacgacgaaaatggcccaaagccaaatagtgacttggaagctggaaagaaccttccatttatttatggagacattcctccagagatggtgtcagagcccctggaggacctggacccctactatatcaataagaaaacttttatagtattgaataaagggaaggccatcttccggttcagtgccacctctgccctgtacattttaactcccttcaatcctcttaggaaaatagctattaagattttggtacattcattattcagcatgctaattatgtgcactattttgacaaactgtgtgtttatgacaatgagtaaccctcctgattggacaaagaatgtagaatacaccttcacaggaatatatacttttgaatcacttataaaaattattgcaaggggattctgtttagaagattttactttccttcgggatccatggaactggctcgatttcactgtcattacatttgcgtacgtcacagagtttgtggacctgggcaatgtctcggcattgagaacattcagagttctccgagcattgaagacgatttcagtcattccaggcctgaaaaccattgtgggagccctgatccagtctgtgaagaagctctcagatgtaatgatcctgactgtgttctgtctgagcgtatttgctctaattgggctgcagctgttcatgggcaacctgaggaataaatgtatacaatggcctcccaccaatgcttccttggaggaacatagtatagaaaagaatataactgtgaattataatggtacacttataaatgaaactgtctttgagtttgactggaagtcatatattcaagattcaagatatcattatttcctggagggttttttagatgcactactatgtggaaatagctctgatgcaggccaatgtccagagggatatatgtgtgtgaaagctggtagaaatcccaattatggctacacaagctttgataccttcagttgggcttttttgtccttgtttcgactaatgactcaggacttctgggaaaatctttatcaactgacattacgtgctgctgggaaaacgtacatgatattttttgtattggtcattttcttgggctcattctacctaataaatttgatcctggctgtggtggccatggcctacgaggaacagaatcaggccaccttggaagaagcagaacagaaagaggccgaatttcagcagatgattgaacagcttaaaaagcaacaggaggcagctcagcaggcagcaacggcaactgcctcagaacattccagagagcccagtgcagcaggcaggctctcagacagctcatctgaagcctctaagttgagttccaagagtgctaaggaaagaagaaatcggaggaagaaaagaaaacagaaagagcagtctggtggggaagagaaagatgaggatgaattccaaaaatctgaatctgaggacagcatcaggaggaaaggttttcgcttctccattgaagggaaccgattgacatatgaaaagaggtactcctccccacaccagtctttgttgagcatccgtggctccctattttcaccaaggcgaaatagcagaacaagccttttcagctttagagggcgagcaaaggatgtgggatctgagaacgacttcgcagatgatgagcacagcacctttgaggataacgagagccgtagagattccttgtttgtgccccgacgacacggagagagacgcaacagcaacctgagtcagaccagtaggtcatcccggatgctggcagtgtttccagcgaatgggaagatgcacagcactgtggattgcaatggtgtggtttccttggttggtggaccttcagttcctacatcgcctgttggacagcttctgccagagggaacaaccactgaaactgaaatgagaaagagaaggtcaagttctttccacgtttccatggactttctagaagatccttcccaaaggcaacgagcaatgagtatagccagcattctaacaaatacagtagaagaacttgaagaatccaggcagaaatgcccaccctgttggtataaattttccaacatattcttaatctgggactgttctccatattggttaaaagtgaaacatgttgtcaacctggttgtgatggacccatttgttgacctggccatcaccatctgtattgtcttaaatactcttttcatggccatggagcactatccaatgacggaccatttcaataatgtgcttacagtaggaaacttggttttcactgggatctttacagcagaaatgtttctgaaaattattgccatggatccttactattatttccaagaaggctggaatatctttgacggttttattgtgacgcttagcctggtagaacttggactcgccaatgtggaaggattatctgttctccgttcatttcgattgctgcgagttttcaagttggcaaaatcttggccaacgttaaatatgctaataaagatcatcggcaattccgtgggggctctgggaaatttaaccctcgtcttggccatcatcgtcttcatttttgccgtggtcggcatgcagctctttggtaaaagctacaaagattgtgtctgcaagatcgccagtgattgtcaactcccacgctggcacatgaatgacttcttccactccttcctgattgtgttccgcgtgctgtgtggggagtggatagagaccatgtgggactgtatggaggttgctggtcaagccatgtgccttactgtcttcatgatggtcatggtgattggaaacctagtggtcctgaatctctttctggccttgcttctgagctcatttagtgcagacaaccttgcagccactgatgatgataatgaaatgaataatctccaaattgctgtggataggatgcacaaaggagtagcttatgtgaaaagaaaaatatatgaatttattcaacagtccttcattaggaaacaaaagattttagatgaaattaaaccacttgatgatctaaacaacaagaaagacagttgtatgtccaatcatacagcagaaattgggaaagatcttgactatcttaaagatgtaaatggaactacaagtggtataggaactggcagcagtgttgaaaaatacattattgatgaaagtgattacatgtcattcataaacaaccccagtcttactgtgactgtaccaattgctgtaggagaatctgactttgaaaatttaaacacggaagactttagtagtgaatcggatctggaagaaagcaaagagaaactgaatgaaagcagtagctcatcagaaggtagcactgtggacatcggcgcacctgtagaagaacagcccgtagtggaacctgaagaaactcttgaaccagaagcttgtttcactgaaggctgtgtacaaagattcaagtgttgtcaaatcaatgtggaagaaggcagaggaaaacaatggtggaacctgagaaggacgtgtttccgaatagttgaacataactggtttgagaccttcattgttttcatgattctccttagtagtggtgctctggcatttgaagatatatatattgatcagcgaaagacgattaagacgatgttggaatatgctgacaaggttttcacttacattttcattctggaaatgcttctaaaatgggtggcatatggctatcaaacatatttcaccaatgcctggtgttggctggacttcttaattgttgatgtttcattggtcagtttaacagcaaatgccttgggttactcagaacttggagccatcaaatctctcaggacactaagagctctgagacctctaagagccttatctcgatttgaagggatgagggtggttgtgaatgcccttttaggagcaattccatccatcatgaatgtgcttctggtttgtcttatattctggctaattttcagcatcatgggcgtaaatttgtttgctggcaaattctaccactgtattaacaccacaactggtgacaggtttgacatcgaagacgtgaataatcatactgattgcctaaaactaatagaaagaaatgagactgctcgatggaaaaatgtgaaagtaaactttgataatgtaggatttgggtatctctctttgcttcaagttgccacattcaaaggatggatggatataatgtatgcagcagttgattccagaaatgtggaactccagcctaagtatgaagaaagtctgtacatgtatctttactttgttattttcatcatctttgggtccttcttcaccttgaacctgtttattggtgtcatcatagataatttcaaccagcagaaaaagaagtttggaggtcaagacatctttatgacagaagaacagaagaaatactataatgcaatgaaaaaattaggatcgaaaaaaccgcaaaagcctatacctcgaccaggaaacaaatttcaaggaatggtctttgacttcgtaaccagacaagtttttgacataagcatcatgattctcatctgtcttaacatggtcacaatgatggtggaaacagatgaccagagtgaatatgtgactaccattttgtcacgcatcaatctggtgttcattgtgctatttactggagagtgtgtactgaaactcatctctctacgccattattattttaccattggatggaatatttttgattttgtggttgtcattctctccattgtaggtatgtttcttgccgagctgatagaaaagtatttcgtgtcccctaccctgttccgagtgatccgtcttgctaggattggccgaatcctacgtctgatcaaaggagcaaaggggatccgcacgctgctctttgctttgatgatgtcccttcctgcgttgtttaacatcggcctcctactcttcctagtcatgttcatctacgccatctttgggatgtccaactttgcctatgttaagagggaagttgggatcgatgacatgttcaactttgagacctttggcaacagcatgatctgcctattccaaattacaacctctgctggctgggatggattgctagcacccattctcaacagtaagccacccgactgtgaccctaataaagttaaccctggaagctcagttaagggagactgtgggaacccatctgttggaattttcttttttgtcagttacatcatcatatccttcctggttgtggtgaacatgtacatcgcggtcatcctggagaacttcagtgttgctactgaagaaagtgcagagcctctgagtgaggatgactttgagatgttctatgaggtttgggagaagtttgatcccgatgcaactcagttcatggaatttgaaaaattatctcagtttgcagctgcgcttgaaccgcctctcaatctgccacaaccaaacaaactccagctcattgccatggatttgcccatggtgagtggtgaccggatccactgtcttgatatcttatttgcttttacaaagcgggttctaggagagagtggagagatggatgctctacgaatacagatggaagagcgattcatggcttccaatccttccaaggtctcctatcagccaatcactactactttaaaacgaaaacaagaggaagtatctgctgtcattattcagcgtgcttacagacgccaccttttaaagcgaactgtaaaacaagcttcctttacgtacaataaaaacaaaatcaaaggtggggctaatcttcttataaaagaagacatgataattgacagaataaatgaaaactctattacagaaaaaactgatctgaccatgtccactgcagcttgtccaccttcctatgaccgggtgacaaagccaattgtggaaaaacatgagcaagaaggcaaagatgaaaaagccaaagggaaataaatgaaaataaataaaaataattgggtgacaaattgtttacagcctgtgaaggtgatgtatttttatcaacaggactcctttaggaggtcaatgccaaactgactgtttttacacaaatctccttaaggtcagtgcctacaataagacagtgaccccttgtcagcaaactgtgactctgtgtaaaggggagatgaccttgacaggaggttactgttctcactaccagctgacactgctgaagataagatgcacaatggctagtcagactgtagggaccagtttcaaggggtgcaaacctgtgattttggggttgtttaacatgaaacactttagtgtagtaattgtatccactgtttgcatttcaactgccacatttgtcacatttttatggaatctgttagtggattcatctttttgttaatccatgtgtttattatatgtgactatttttgtaaacgaagtttctgttgagaaataggctaaggacctctataacaggtatgccacctggggggtatggcaaccacatggccctcccagctacacaaagtcgtggtttgcatgagggcatgctgcacttagagatcatgcatgagaaaaagtcacaagaaaaacaaattcttaaatttcaccatatttctgggaggggtaattgggtgataagtggaggtgctttgttgatcttgttttgcgaaatccagcccctagaccaagtagattatttgtgggtaggccagtaaatcttagcaggtgcaaacttcattcaaatgtttggagtcataaatgttatgtttctttttgttgtattaaaaaaaaaacctgaatagtgaatattgcccctcaccctccaccgccagaagactgaattgaccaaaattactctttataaatttctgctttttcctgcactttgtttagccatcttcggctctcagcaaggttgacactgtatatgttaatgaaatgctatttattatgtaaatagtcattttaccctgtggtgcacgtttgagcaaacaaataatgacctaagcacagtatttattgcatcaaatatgtaccacaagaaatgtagagtgcaagctttacacaggtaataaaatgtattctgtaccatttatagatagtttggatgctatcaatgcatgtttatattaccatgctgctgtatctggtttctctcactgctcagaatctcatttatgagaaaccatatgtcagtggtaaagtcaaggaaattgttcaacagatctcatttatttaagtcattaagcaatagtttgcagcactttaacagctttttggttatttttacattttaagtggataacatatggtatatagccagactgtacagacatgtttaaaaaaacacactgcttaacctattaaatatgtgtttagaattttataagcaaatataaatactgtaaaaagtcactttattttatttttcagcattatgtacataaatatgaagaggaaattatcttcaggttgatatcacaatcacttttcttactttctgtccatagtactttttcatgaaagaaatttgctaaataagacatgaaaacaagactgggtagttgtagatttctgctttttaaattacatttgctaattttagattatttcacaattttaaggagcaaaataggttcacgattcatatccaaattatgctttgcaattggaaaagggtttaaaattttatttatatttctggtagtacctgcactaactgaattgaaggtagtgcttatgttatttttgttctttttttctgacttcggtttatgttttcatttctttggagtaatgctgctctagattgttctaaatagaatgtgggcttcataatttttttttccacaaaaacagagtagtcaacttatatagtcaattacatcaggacattttgtgtttcttacagaagcaaaccataggctcctcttttccttaaaactacttagataaactgtattcgtgaactgcatgctggaaaatgctactattatgctaaataatgctaaccaacatttaaaatgtgcaaaactaataaagattacattttttattttattgtttgcccagtcactttttgttaacagaatattctaatgatatggagattttttacattacaaattgggggagaaggggagcgcgcgcgcacacacacacacacacacacacacacacacacacacacagaggcatacccacgttgacaacaaaacctagggtagatatgtcactggaggtagggggtaatgacctcccagaattacaagcagcaggtgtgttctctgttaggaggaagaactggtgtcagaggatagctagtgattctaggaggaagagaagtatggaagccagagtgatggtggatgaccccttgagctatgaaaagaaacccttaaatcatcatttaaaaatttagaattgccatgtgtgtaggatactgtgtttgctcctccagagccactctctctgcttctgcatcattctgtgtgtcccagaagggtgacttctacacattgcaaaaatgggctctcctacctttgagctcccaattggtttggccaatgagaagcaccagtgggaaagcaccagagagagaagattgacataggaatatttcttctccaattccttctttgctgggttggcactggactcattcctccccgaaaagtcatactccaatcagactgcccctcatacaactgaagctactttctctggggtcaggtaatcactcctccccttgctccttcaggtctgctgctgcattgagagtgcttttgtattccttgtagctttctcctaacattgctgacacttttgtaaatgtccccttcatgaaattcttctatatgcctcatttcagcatgccatctgtctcctgcctggctgacacaaggtgattcaacagctcatgaaagtcagcaggaagcaaagatgtgccttgcttcagcttggggtcttaatcttgctaacttttgcagataaagaaaaacagtaactgggggaaccacagtgaagtccagtgcagaattcacagatatcatggaaaggttactcgggtggtccagatagtaaaattaacagtctaaattaatctatctaaatttctgaggaacgagaagccttcccttgtcatcaggtgaagccagaagagggaatatagcctcaaccagaaaagggacagtaattaaaaggcttttcccatccttgtacaatggactgactttgcctcttcataacatcacaatcctaaagcaacacaacaattaattctgatatattagtagctgaaaaaaattcccatttccaactaaggtaggtcagaattataggataaaccctgcagactttttatactacccatccacgccattactcactgttacctttccaaatacaaagagaagaactggtaaaacataatcatataaatctccatattcattttgaaatatttggcatgatattttctgtgctaaaaagtaattattcttcaaagaatgatgaggtcatgtcagtaagacacaggaaccaactagaaggggcttcccactggccaaatctggggcaagttgagcatcaaaataaatgatagtaaaagattataattcattgaataagaatcagcaaatacatactgatgtaagtaaataaggaaaagtacaaatctgtttcttgcagttgaatgttaattaacaattgtagaagaaataacggagttagaaaaatcactatttggcaatcaccctaatgacaattgattcatacaagaatcatcaatgagtattaaaactcatgggtgaaagtttgatgaggaatagggtatttatagcatcttaaagtatctcttctctattaagtagaaaatttaaacagaagaaagtatactttggagaaatacagcagacaataccttcaaagatatcatcaattatgagaccaactgatactatgtgcctcctgataagatatactgaaagggccacattacttcttggtacacagtcaaaattttaaaaccagaatctaactacaaggaaaatcaaattgaggacactctataaaataagtggactgaactccttaaaaatgtcaatgtcatgaaagacaaagaaaggctaaagaattccatgaggtcaaagaactatgacaactaaacacaattctggatggaatatcaaattaaaaaataacagataaataatattattgggaaagttgaataaatttgaatatggactgtttattagttattagtattataatagtgttaattttcctaattttgttaagactagtgtgcctgttccatgaaaatagaaaatgttcttattctctgaaaatgcatgctaaagtatttaggggtgaatgcaacaatgtctgcagctcattcttgaatcagttcaaagaaaaatgagttacatttatatatatatgtatgtatgtaaacagacatagataaaagtatagatgtgtgtgtgtctttagaaaggggaggattttttttttttttttgctgtgtgttactgaagtgcctatgtctgcgtgttcacactatcatattttgtatgccctggactttataatttctaccttcaaaattagatctactgttggtaattaattcaatatatactggttttttaactactattctcatttcctagcagtaatcttcctgaaaagtcacagaaatgattacattccttgttcttcataataatcactgtttaattaaaataagaatattttagaaaagatctgcggcatagtggttaagaccccagtatttgatgctaaacagatctgatttggataacagaaggtggcactttgctgtttaagctggggaccagacactgtgggtataaatagtaattccaaacacagctccacagagcagcacccttatgacaaggttttcatatgtctatagttaagccagaaaattaagaataatgccataaatatttataaagctgaacatatccaagttaaagacctttatcctgaaattgtatcttttagattattttctaaagactaataccatttaatgtttaaatgttctttggaaatgatggtgagaatacgtgataatgggtcattggttttaatattttatttagccaagtggaaaattggcaacctggtgtcggtcctcccatttgtattttactggtgcatgaaatccaaaagtctagtaaccattgggacagacaactctactgcataagtttgtatgtttgtatatctgtatcacaaagcccagacactcgaactatataaacttgtcgcactaaagacagcaaatatgtctggtaattgcatattcttcatgtgtgcactggaatttcttattatataagaaaataaatgtgtttctaaaccaccatgaattgggtactgctgatagtactattcttcctggcacatggaaatatcccactgaggttgtcaatcaatattgatttaatcagtgtggcagcaaaggcactagaggaggaaaatactctagacaatcaagtatagatgggaaaattgcatcaccaagaaattcttaaaatcacaagtggataatttgcaatatcaattgattttactcaactgcttgagtcctttatcattccgttagaacactcctcatatttgcagataactcagcccctcacctcagcaacaagcaagaggacatcattataaacttcctcaatttctttcctatccagtgaaaaatatctaagtcccttttcccttcccttttccttcccttcccttcctttttctttccttccattctcttcctttttccttcctttttctttccttccattctcttcctttttccttcctttttcttactttacctccccctcctacctttccctttctcccttcctccctctctcccttccttcctctctccctctccttccttccttccttcaatccatacttttatatcttttcagagatcaatttttcccattcatttctacattctcagataccttgctccatgacttgttctacttctcttctatctttattctttccctcttgactgatcctttttgtctgcctttgcattttcaaaatcagtttttctaatcttaaaaaataactttgctcaaccctgatgcatctttattcactgtgtcattatctcattatttttaaaggttagtttctaaagccagggctctatactcactaccttcactcttggttaaaattaaaagaaatataggtcccagtgatatttatgggaaaatttgactgtgaataatcttgttgatataaacactttgggttttcaaaatgttatgctagctgttaactttcccagtaacattatgagggaagggctggaaaatacaaaaggtagacataggaaccgagaacaccacccctatggagccaagctatacatactctgtctctggttatcataaatacatctcctatattcaatgcttgcttagaaaggcatgatgtccacggagcaattcaattgttcactgtgatgggtttttttgttttctcctcatggaatgcaacttttatttat

SEQ ID NO: 550 - DNA, 12890 bp, Homo sapiens
  source 1..12890: mol_type = genomic DNA
aagtgtaggagacacactgctggcctgtggaaactcatggaactgttcctccagattaacacttcaggggttatggaagctggaggaagctgagcttttactacatcttttgggggtttgggcaattatgaataaggctgctgtatacatccgtgtgcaggattttgtgtggacataagttttcaactcctttggttaaatcctaaggaatttcatatgcagaataaatggtaattaaaatgtgcaggatgacaagatggagcaaacagtgcttgtaccaccaggacctgacagcttcaacttcttcaccagagaatctcttgcggctattgaaagacgcattgcagaagaaaaggcaaagaatcccaaaccagacaaaaaagatgacgacgaaaatggcccaaagccaaatagtgacttggaagctggaaagaaccttccatttatttatggagacattcctccagagatggtgtcagagcccctggaggacctggacccctactatatcaataagaaaacttttatagtattgaataaagggaaggccatcttccggttcagtgccacctctgccctgtacattttaactcccttcaatcctcttaggaaaatagctattaagattttggtacattcattattcagcatgctaattatgtgcactattttgacaaactgtgtgtttatgacaatgagtaaccctcctgattggacaaagaatgtagaatacaccttcacaggaatatatacttttgaatcacttataaaaattattgcaaggggattctgtttagaagattttactttccttcgggatccatggaactggctcgatttcactgtcattacatttgcgtacgtcacagagtttgtggacctgggcaatgtctcggcattgagaacattcagagttctccgagcattgaagacgatttcagtcattccaggcctgaaaaccattgtgggagccctgatccagtctgtgaagaagctctcagatgtaatgatcctgactgtgttctgtctgagcgtatttgctctaattgggctgcagctgttcatgggcaacctgaggaataaatgtatacaatggcctcccaccaatgcttccttggaggaacatagtatagaaaagaatataactgtgaattataatggtacacttataaatgaaactgtctttgagtttgactggaagtcatatattcaagattcaagatatcattatttcctggagggttttttagatgcactactatgtggaaatagctctgatgcaggccaatgtccagagggatatatgtgtgtgaaagctggtagaaatcccaattatggctacacaagctttgataccttcagttgggcttttttgtccttgtttcgactaatgactcaggacttctgggaaaatctttatcaactgacattacgtgctgctgggaaaacgtacatgatattttttgtattggtcattttcttgggctcattctacctaataaatttgatcctggctgtggtggccatggcctacgaggaacagaatcaggccaccttggaagaagcagaacagaaagaggccgaatttcagcagatgattgaacagcttaaaaagcaacaggaggcagctcagcaggcagcaacggcaactgcctcagaacattccagagagcccagtgcagcaggcaggctctcagacagctcatctgaagcctctaagttgagttccaagagtgctaaggaaagaagaaatcggaggaagaaaagaaaacagaaagagcagtctggtggggaagagaaagatgaggatgaattccaaaaatctgaatctgaggacagcatcaggaggaaaggttttcgcttctccattgaagggaaccgattgacatatgaaaagaggtactcctccccacaccagtctttgttgagcatccgtggctccctattttcaccaaggcgaaatagcagaacaagccttttcagctttagagggcgagcaaaggatgtgggatctgagaacgacttcgcagatgatgagcacagcacctttgaggataacgagagccgtagagattccttgtttgtgccccgacgacacggagagagacgcaacagcaacctgagtcagaccagtaggtcatcccggatgctggcagtgtttccagcgaatgggaagatgcacagcactgtggattgcaatggtgtggtttccttggttggtggaccttcagttcctacatcgcctgttggacagcttctgccagaggtgataatagataagccagctactgatgacaatggaacaaccactgaaactgaaatgagaaagagaaggtcaagttctttccacgtttccatggactttctagaagatccttcccaaaggcaacgagcaatgagtatagccagcattctaacaaatacagtagaagaacttgaagaatccaggcagaaatgcccaccctgttggtataaattttccaacatattcttaatctgggactgttctccatattggttaaaagtgaaacatgttgtcaacctggttgtgatggacccatttgttgacctggccatcaccatctgtattgtcttaaatactcttttcatggccatggagcactatccaatgacggaccatttcaataatgtgcttacagtaggaaacttggttttcactgggatctttacagcagaaatgtttctgaaaattattgccatggatccttactattatttccaagaaggctggaatatctttgacggttttattgtgacgcttagcctggtagaacttggactcgccaatgtggaaggattatctgttctccgttcatttcgattgctgcgagttttcaagttggcaaaatcttggccaacgttaaatatgctaataaagatcatcggcaattccgtgggggctctgggaaatttaaccctcgtcttggccatcatcgtcttcatttttgccgtggtcggcatgcagctctttggtaaaagctacaaagattgtgtctgcaagatcgccagtgattgtcaactcccacgctggcacatgaatgacttcttccactccttcctgattgtgttccgcgtgctgtgtggggagtggatagagaccatgtgggactgtatggaggttgctggtcaagccatgtgccttactgtcttcatgatggtcatggtgattggaaacctagtggtcctgaatctctttctggccttgcttctgagctcatttagtgcagacaaccttgcagccactgatgatgataatgaaatgaataatctccaaattgctgtggataggatgcacaaaggagtagcttatgtgaaaagaaaaatatatgaatttattcaacagtccttcattaggaaacaaaagattttagatgaaattaaaccacttgatgatctaaacaacaagaaagacagttgtatgtccaatcatacagcagaaattgggaaagatcttgactatcttaaagatgtaaatggaactacaagtggtataggaactggcagcagtgttgaaaaatacattattgatgaaagtgattacatgtcattcataaacaaccccagtcttactgtgactgtaccaattgctgtaggagaatctgactttgaaaatttaaacacggaagactttagtagtgaatcggatctggaagaaagcaaagagaaactgaatgaaagcagtagctcatcagaaggtagcactgtggacatcggcgcacctgtagaagaacagcccgtagtggaacctgaagaaactcttgaaccagaagcttgtttcactgaaggctgtgtacaaagattcaagtgttgtcaaatcaatgtggaagaaggcagaggaaaacaatggtggaacctgagaaggacgtgtttccgaatagttgaacataactggtttgagaccttcattgttttcatgattctccttagtagtggtgctctggcatttgaagatatatatattgatcagcgaaagacgattaagacgatgttggaatatgctgacaaggttttcacttacattttcattctggaaatgcttctaaaatgggtggcatatggctatcaaacatatttcaccaatgcctggtgttggctggacttcttaattgttgatgtttcattggtcagtttaacagcaaatgccttgggttactcagaacttggagccatcaaatctctcaggacactaagagctctgagacctctaagagccttatctcgatttgaagggatgagggtggttgtgaatgcccttttaggagcaattccatccatcatgaatgtgcttctggtttgtcttatattctggctaattttcagcatcatgggcgtaaatttgtttgctggcaaattctaccactgtattaacaccacaactggtgacaggtttgacatcgaagacgtgaataatcatactgattgcctaaaactaatagaaagaaatgagactgctcgatggaaaaatgtgaaagtaaactttgataatgtaggatttgggtatctctctttgcttcaagttgccacattcaaaggatggatggatataatgtatgcagcagttgattccagaaatgtggaactccagcctaagtatgaagaaagtctgtacatgtatctttactttgttattttcatcatctttgggtccttcttcaccttgaacctgtttattggtgtcatcatagataatttcaaccagcagaaaaagaagtttggaggtcaagacatctttatgacagaagaacagaagaaatactataatgcaatgaaaaaattaggatcgaaaaaaccgcaaaagcctatacctcgaccaggaaacaaatttcaaggaatggtctttgacttcgtaaccagacaagtttttgacataagcatcatgattctcatctgtcttaacatggtcacaatgatggtggaaacagatgaccagagtgaatatgtgactaccattttgtcacgcatcaatctggtgttcattgtgctatttactggagagtgtgtactgaaactcatctctctacgccattattattttaccattggatggaatatttttgattttgtggttgtcattctctccattgtaggtatgtttcttgccgagctgatagaaaagtatttcgtgtcccctaccctgttccgagtgatccgtcttgctaggattggccgaatcctacgtctgatcaaaggagcaaaggggatccgcacgctgctctttgctttgatgatgtcccttcctgcgttgtttaacatcggcctcctactcttcctagtcatgttcatctacgccatctttgggatgtccaactttgcctatgttaagagggaagttgggatcgatgacatgttcaactttgagacctttggcaacagcatgatctgcctattccaaattacaacctctgctggctgggatggattgctagcacccattctcaacagtaagccacccgactgtgaccctaataaagttaaccctggaagctcagttaagggagactgtgggaacccatctgttggaattttcttttttgtcagttacatcatcatatccttcctggttgtggtgaacatgtacatcgcggtcatcctggagaacttcagtgttgctactgaagaaagtgcagagcctctgagtgaggatgactttgagatgttctatgaggtttgggagaagtttgatcccgatgcaactcagttcatggaatttgaaaaattatctcagtttgcagctgcgcttgaaccgcctctcaatctgccacaaccaaacaaactccagctcattgccatggatttgcccatggtgagtggtgaccggatccactgtcttgatatcttatttgcttttacaaagcgggttctaggagagagtggagagatggatgctctacgaatacagatggaagagcgattcatggcttccaatccttccaaggtctcctatcagccaatcactactactttaaaacgaaaacaagaggaagtatctgctgtcattattcagcgtgcttacagacgccaccttttaaagcgaactgtaaaacaagcttcctttacgtacaataaaaacaaaatcaaaggtggggctaatcttcttataaaagaagacatgataattgacagaataaatgaaaactctattacagaaaaaactgatctgaccatgtccactgcagcttgtccaccttcctatgaccgggtgacaaagccaattgtggaaaaacatgagcaagaaggcaaagatgaaaaagccaaagggaaataaatgaaaataaataaaaataattgggtgacaaattgtttacagcctgtgaaggtgatgtatttttatcaacaggactcctttaggaggtcaatgccaaactgactgtttttacacaaatctccttaaggtcagtgcctacaataagacagtgaccccttgtcagcaaactgtgactctgtgtaaaggggagatgaccttgacaggaggttactgttctcactaccagctgacactgctgaagataagatgcacaatggctagtcagactgtagggaccagtttcaaggggtgcaaacctgtgattttggggttgtttaacatgaaacactttagtgtagtaattgtatccactgtttgcatttcaactgccacatttgtcacatttttatggaatctgttagtggattcatctttttgttaatccatgtgtttattatatgtgactatttttgtaaacgaagtttctgttgagaaataggctaaggacctctataacaggtatgccacctggggggtatggcaaccacatggccctcccagctacacaaagtcgtggtttgcatgagggcatgctgcacttagagatcatgcatgagaaaaagtcacaagaaaaacaaattcttaaatttcaccatatttctgggaggggtaattgggtgataagtggaggtgctttgttgatcttgttttgcgaaatccagcccctagaccaagtagattatttgtgggtaggccagtaaatcttagcaggtgcaaacttcattcaaatgtttggagtcataaatgttatgtttctttttgttgtattaaaaaaaaaacctgaatagtgaatattgcccctcaccctccaccgccagaagactgaattgaccaaaattactctttataaatttctgctttttcctgcactttgtttagccatcttcggctctcagcaaggttgacactgtatatgttaatgaaatgctatttattatgtaaatagtcattttaccctgtggtgcacgtttgagcaaacaaataatgacctaagcacagtatttattgcatcaaatatgtaccacaagaaatgtagagtgcaagctttacacaggtaataaaatgtattctgtaccatttatagatagtttggatgctatcaatgcatgtttatattaccatgctgctgtatctggtttctctcactgctcagaatctcatttatgagaaaccatatgtcagtggtaaagtcaaggaaattgttcaacagatctcatttatttaagtcattaagcaatagtttgcagcactttaacagctttttggttatttttacattttaagtggataacatatggtatatagccagactgtacagacatgtttaaaaaaacacactgcttaacctattaaatatgtgtttagaattttataagcaaatataaatactgtaaaaagtcactttattttatttttcagcattatgtacataaatatgaagaggaaattatcttcaggttgatatcacaatcacttttcttactttctgtccatagtactttttcatgaaagaaatttgctaaataagacatgaaaacaagactgggtagttgtagatttctgctttttaaattacatttgctaattttagattatttcacaattttaaggagcaaaataggttcacgattcatatccaaattatgctttgcaattggaaaagggtttaaaattttatttatatttctggtagtacctgcactaactgaattgaaggtagtgcttatgttatttttgttctttttttctgacttcggtttatgttttcatttctttggagtaatgctgctctagattgttctaaatagaatgtgggcttcataatttttttttccacaaaaacagagtagtcaacttatatagtcaattacatcaggacattttgtgtttcttacagaagcaaaccataggctcctcttttccttaaaactacttagataaactgtattcgtgaactgcatgctggaaaatgctactattatgctaaataatgctaaccaacatttaaaatgtgcaaaactaataaagattacattttttattttattgtttgcccagtcactttttgttaacagaatattctaatgatatggagattttttacattacaaattgggggagaaggggagcgcgcgcgcacacacacacacacacacacacacacacacacacacacagaggcatacccacgttgacaacaaaacctagggtagatatgtcactggaggtagggggtaatgacctcccagaattacaagcagcaggtgtgttctctgttaggaggaagaactggtgtcagaggatagctagtgattctaggaggaagagaagtatggaagccagagtgatggtggatgaccccttgagctatgaaaagaaacccttaaatcatcatttaaaaatttagaattgccatgtgtgtaggatactgtgtttgctcctccagagccactctctctgcttctgcatcattctgtgtgtcccagaagggtgacttctacacattgcaaaaatgggctctcctacctttgagctcccaattggtttggccaatgagaagcaccagtgggaaagcaccagagagagaagattgacataggaatatttcttctccaattccttctttgctgggttggcactggactcattcctccccgaaaagtcatactccaatcagactgcccctcatacaactgaagctactttctctggggtcaggtaatcactcctccccttgctccttcaggtctgctgctgcattgagagtgcttttgtattccttgtagctttctcctaacattgctgacacttttgtaaatgtccccttcatgaaattcttctatatgcctcatttcagcatgccatctgtctcctgcctggctgacacaaggtgattcaacagctcatgaaagtcagcaggaagcaaagatgtgccttgcttcagcttggggtcttaatcttgctaacttttgcagataaagaaaaacagtaactgggggaaccacagtgaagtccagtgcagaattcacagatatcatggaaaggttactcgggtggtccagatagtaaaattaacagtctaaattaatctatctaaatttctgaggaacgagaagccttcccttgtcatcaggtgaagccagaagagggaatatagcctcaaccagaaaagggacagtaattaaaaggcttttcccatccttgtacaatggactgactttgcctcttcataacatcacaatcctaaagcaacacaacaattaattctgatatattagtagctgaaaaaaattcccatttccaactaaggtaggtcagaattataggataaaccctgcagactttttatactacccatccacgccattactcactgttacctttccaaatacaaagagaagaactggtaaaacataatcatataaatctccatattcattttgaaatatttggcatgatattttctgtgctaaaaagtaattattcttcaaagaatgatgaggtcatgtcagtaagacacaggaaccaactagaaggggcttcccactggccaaatctggggcaagttgagcatcaaaataaatgatagtaaaagattataattcattgaataagaatcagcaaatacatactgatgtaagtaaataaggaaaagtacaaatctgtttcttgcagttgaatgttaattaacaattgtagaagaaataacggagttagaaaaatcactatttggcaatcaccctaatgacaattgattcatacaagaatcatcaatgagtattaaaactcatgggtgaaagtttgatgaggaatagggtatttatagcatcttaaagtatctcttctctattaagtagaaaatttaaacagaagaaagtatactttggagaaatacagcagacaataccttcaaagatatcatcaattatgagaccaactgatactatgtgcctcctgataagatatactgaaagggccacattacttcttggtacacagtcaaaattttaaaaccagaatctaactacaaggaaaatcaaattgaggacactctataaaataagtggactgaactccttaaaaatgtcaatgtcatgaaagacaaagaaaggctaaagaattccatgaggtcaaagaactatgacaactaaacacaattctggatggaatatcaaattaaaaaataacagataaataatattattgggaaagttgaataaatttgaatatggactgtttattagttattagtattataatagtgttaattttcctaattttgttaagactagtgtgcctgttccatgaaaatagaaaatgttcttattctctgaaaatgcatgctaaagtatttaggggtgaatgcaacaatgtctgcagctcattcttgaatcagttcaaagaaaaatgagttacatttatatatatatgtatgtatgtaaacagacatagataaaagtatagatgtgtgtgtgtctttagaaaggggaggattttttttttttttttgctgtgtgttactgaagtgcctatgtctgcgtgttcacactatcatattttgtatgccctggactttataatttctaccttcaaaattagatctactgttggtaattaattcaatatatactggttttttaactactattctcatttcctagcagtaatcttcctgaaaagtcacagaaatgattacattccttgttcttcataataatcactgtttaattaaaataagaatattttagaaaagatctgcggcatagtggttaagaccccagtatttgatgctaaacagatctgatttggataacagaaggtggcactttgctgtttaagctggggaccagacactgtgggtataaatagtaattccaaacacagctccacagagcagcacccttatgacaaggttttcatatgtctatagttaagccagaaaattaagaataatgccataaatatttataaagctgaacatatccaagttaaagacctttatcctgaaattgtatcttttagattattttctaaagactaataccatttaatgtttaaatgttctttggaaatgatggtgagaatacgtgataatgggtcattggttttaatattttatttagccaagtggaaaattggcaacctggtgtcggtcctcccatttgtattttactggtgcatgaaatccaaaagtctagtaaccattgggacagacaactctactgcataagtttgtatgtttgtatatctgtatcacaaagcccagacactcgaactatataaacttgtcgcactaaagacagcaaatatgtctggtaattgcatattcttcatgtgtgcactggaatttcttattatataagaaaataaatgtgtttctaaaccaccatgaattgggtactgctgatagtactattcttcctggcacatggaaatatcccactgaggttgtcaatcaatattgatttaatcagtgtggcagcaaaggcactagaggaggaaaatactctagacaatcaagtatagatgggaaaattgcatcaccaagaaattcttaaaatcacaagtggataatttgcaatatcaattgattttactcaactgcttgagtcctttatcattccgttagaacactcctcatatttgcagataactcagcccctcacctcagcaacaagcaagaggacatcattataaacttcctcaatttctttcctatccagtgaaaaatatctaagtcccttttcccttcccttttccttcccttcccttcctttttctttccttccattctcttcctttttccttcctttttctttccttccattctcttcctttttccttcctttttcttactttacctccccctcctacctttccctttctcccttcctccctctctcccttccttcctctctccctctccttccttccttccttcaatccatacttttatatcttttcagagatcaatttttcccattcatttctacattctcagataccttgctccatgacttgttctacttctcttctatctttattctttccctcttgactgatcctttttgtctgcctttgcattttcaaaatcagtttttctaatcttaaaaaataactttgctcaaccctgatgcatctttattcactgtgtcattatctcattatttttaaaggttagtttctaaagccagggctctatactcactaccttcactcttggttaaaattaaaagaaatataggtcccagtgatatttatgggaaaatttgactgtgaataatcttgttgatataaacactttgggttttcaaaatgttatgctagctgttaactttcccagtaacattatgagggaagggctggaaaatacaaaaggtagacataggaaccgagaacaccacccctatggagccaagctatacatactctgtctctggttatcataaatacatctcctatattcaatgcttgcttagaaaggcatgatgtccacggagcaattcaattgttcactgtgatgggtttttttgttttctcctcatggaatgcaacttttatttat

SEQ ID NO: 551 - DNA, 12897 bp, Homo sapiens
  source 1..12897: mol_type = genomic DNA
accatagagtgaggcgaggatgaagccgagaggatactgcagaggtctctggtgcatgtgtgtatgtgtgcgtttgtgtgtgtttgtgtgtctgtgtgttctgccccagtgagactgcagcccttgtaaatactttgacaccttttgcaagaaggaatctgaacaattgcaactgaaggcacattgttatcatctcgtctttgggtgatgctgttcctcactgcagatggataattttccttttaatcaggaatttcatatgcagaataaatggtaattaaaatgtgcaggatgacaagatggagcaaacagtgcttgtaccaccaggacctgacagcttcaacttcttcaccagagaatctcttgcggctattgaaagacgcattgcagaagaaaaggcaaagaatcccaaaccagacaaaaaagatgacgacgaaaatggcccaaagccaaatagtgacttggaagctggaaagaaccttccatttatttatggagacattcctccagagatggtgtcagagcccctggaggacctggacccctactatatcaataagaaaacttttatagtattgaataaagggaaggccatcttccggttcagtgccacctctgccctgtacattttaactcccttcaatcctcttaggaaaatagctattaagattttggtacattcattattcagcatgctaattatgtgcactattttgacaaactgtgtgtttatgacaatgagtaaccctcctgattggacaaagaatgtagaatacaccttcacaggaatatatacttttgaatcacttataaaaattattgcaaggggattctgtttagaagattttactttccttcgggatccatggaactggctcgatttcactgtcattacatttgcgtacgtcacagagtttgtggacctgggcaatgtctcggcattgagaacattcagagttctccgagcattgaagacgatttcagtcattccaggcctgaaaaccattgtgggagccctgatccagtctgtgaagaagctctcagatgtaatgatcctgactgtgttctgtctgagcgtatttgctctaattgggctgcagctgttcatgggcaacctgaggaataaatgtatacaatggcctcccaccaatgcttccttggaggaacatagtatagaaaagaatataactgtgaattataatggtacacttataaatgaaactgtctttgagtttgactggaagtcatatattcaagattcaagatatcattatttcctggagggttttttagatgcactactatgtggaaatagctctgatgcaggccaatgtccagagggatatatgtgtgtgaaagctggtagaaatcccaattatggctacacaagctttgataccttcagttgggcttttttgtccttgtttcgactaatgactcaggacttctgggaaaatctttatcaactgacattacgtgctgctgggaaaacgtacatgatattttttgtattggtcattttcttgggctcattctacctaataaatttgatcctggctgtggtggccatggcctacgaggaacagaatcaggccaccttggaagaagcagaacagaaagaggccgaatttcagcagatgattgaacagcttaaaaagcaacaggaggcagctcaggcagcaacggcaactgcctcagaacattccagagagcccagtgcagcaggcaggctctcagacagctcatctgaagcctctaagttgagttccaagagtgctaaggaaagaagaaatcggaggaagaaaagaaaacagaaagagcagtctggtggggaagagaaagatgaggatgaattccaaaaatctgaatctgaggacagcatcaggaggaaaggttttcgcttctccattgaagggaaccgattgacatatgaaaagaggtactcctccccacaccagtctttgttgagcatccgtggctccctattttcaccaaggcgaaatagcagaacaagccttttcagctttagagggcgagcaaaggatgtgggatctgagaacgacttcgcagatgatgagcacagcacctttgaggataacgagagccgtagagattccttgtttgtgccccgacgacacggagagagacgcaacagcaacctgagtcagaccagtaggtcatcccggatgctggcagtgtttccagcgaatgggaagatgcacagcactgtggattgcaatggtgtggtttccttggttggtggaccttcagttcctacatcgcctgttggacagcttctgccagagggaacaaccactgaaactgaaatgagaaagagaaggtcaagttctttccacgtttccatggactttctagaagatccttcccaaaggcaacgagcaatgagtatagccagcattctaacaaatacagtagaagaacttgaagaatccaggcagaaatgcccaccctgttggtataaattttccaacatattcttaatctgggactgttctccatattggttaaaagtgaaacatgttgtcaacctggttgtgatggacccatttgttgacctggccatcaccatctgtattgtcttaaatactcttttcatggccatggagcactatccaatgacggaccatttcaataatgtgcttacagtaggaaacttggttttcactgggatctttacagcagaaatgtttctgaaaattattgccatggatccttactattatttccaagaaggctggaatatctttgacggttttattgtgacgcttagcctggtagaacttggactcgccaatgtggaaggattatctgttctccgttcatttcgattgctgcgagttttcaagttggcaaaatcttggccaacgttaaatatgctaataaagatcatcggcaattccgtgggggctctgggaaatttaaccctcgtcttggccatcatcgtcttcatttttgccgtggtcggcatgcagctctttggtaaaagctacaaagattgtgtctgcaagatcgccagtgattgtcaactcccacgctggcacatgaatgacttcttccactccttcctgattgtgttccgcgtgctgtgtggggagtggatagagaccatgtgggactgtatggaggttgctggtcaagccatgtgccttactgtcttcatgatggtcatggtgattggaaacctagtggtcctgaatctctttctggccttgcttctgagctcatttagtgcagacaaccttgcagccactgatgatgataatgaaatgaataatctccaaattgctgtggataggatgcacaaaggagtagcttatgtgaaaagaaaaatatatgaatttattcaacagtccttcattaggaaacaaaagattttagatgaaattaaaccacttgatgatctaaacaacaagaaagacagttgtatgtccaatcatacagcagaaattgggaaagatcttgactatcttaaagatgtaaatggaactacaagtggtataggaactggcagcagtgttgaaaaatacattattgatgaaagtgattacatgtcattcataaacaaccccagtcttactgtgactgtaccaattgctgtaggagaatctgactttgaaaatttaaacacggaagactttagtagtgaatcggatctggaagaaagcaaagagaaactgaatgaaagcagtagctcatcagaaggtagcactgtggacatcggcgcacctgtagaagaacagcccgtagtggaacctgaagaaactcttgaaccagaagcttgtttcactgaaggctgtgtacaaagattcaagtgttgtcaaatcaatgtggaagaaggcagaggaaaacaatggtggaacctgagaaggacgtgtttccgaatagttgaacataactggtttgagaccttcattgttttcatgattctccttagtagtggtgctctggcatttgaagatatatatattgatcagcgaaagacgattaagacgatgttggaatatgctgacaaggttttcacttacattttcattctggaaatgcttctaaaatgggtggcatatggctatcaaacatatttcaccaatgcctggtgttggctggacttcttaattgttgatgtttcattggtcagtttaacagcaaatgccttgggttactcagaacttggagccatcaaatctctcaggacactaagagctctgagacctctaagagccttatctcgatttgaagggatgagggtggttgtgaatgcccttttaggagcaattccatccatcatgaatgtgcttctggtttgtcttatattctggctaattttcagcatcatgggcgtaaatttgtttgctggcaaattctaccactgtattaacaccacaactggtgacaggtttgacatcgaagacgtgaataatcatactgattgcctaaaactaatagaaagaaatgagactgctcgatggaaaaatgtgaaagtaaactttgataatgtaggatttgggtatctctctttgcttcaagttgccacattcaaaggatggatggatataatgtatgcagcagttgattccagaaatgtggaactccagcctaagtatgaagaaagtctgtacatgtatctttactttgttattttcatcatctttgggtccttcttcaccttgaacctgtttattggtgtcatcatagataatttcaaccagcagaaaaagaagtttggaggtcaagacatctttatgacagaagaacagaagaaatactataatgcaatgaaaaaattaggatcgaaaaaaccgcaaaagcctatacctcgaccaggaaacaaatttcaaggaatggtctttgacttcgtaaccagacaagtttttgacataagcatcatgattctcatctgtcttaacatggtcacaatgatggtggaaacagatgaccagagtgaatatgtgactaccattttgtcacgcatcaatctggtgttcattgtgctatttactggagagtgtgtactgaaactcatctctctacgccattattattttaccattggatggaatatttttgattttgtggttgtcattctctccattgtaggtatgtttcttgccgagctgatagaaaagtatttcgtgtcccctaccctgttccgagtgatccgtcttgctaggattggccgaatcctacgtctgatcaaaggagcaaaggggatccgcacgctgctctttgctttgatgatgtcccttcctgcgttgtttaacatcggcctcctactcttcctagtcatgttcatctacgccatctttgggatgtccaactttgcctatgttaagagggaagttgggatcgatgacatgttcaactttgagacctttggcaacagcatgatctgcctattccaaattacaacctctgctggctgggatggattgctagcacccattctcaacagtaagccacccgactgtgaccctaataaagttaaccctggaagctcagttaagggagactgtgggaacccatctgttggaattttcttttttgtcagttacatcatcatatccttcctggttgtggtgaacatgtacatcgcggtcatcctggagaacttcagtgttgctactgaagaaagtgcagagcctctgagtgaggatgactttgagatgttctatgaggtttgggagaagtttgatcccgatgcaactcagttcatggaatttgaaaaattatctcagtttgcagctgcgcttgaaccgcctctcaatctgccacaaccaaacaaactccagctcattgccatggatttgcccatggtgagtggtgaccggatccactgtcttgatatcttatttgcttttacaaagcgggttctaggagagagtggagagatggatgctctacgaatacagatggaagagcgattcatggcttccaatccttccaaggtctcctatcagccaatcactactactttaaaacgaaaacaagaggaagtatctgctgtcattattcagcgtgcttacagacgccaccttttaaagcgaactgtaaaacaagcttcctttacgtacaataaaaacaaaatcaaaggtggggctaatcttcttataaaagaagacatgataattgacagaataaatgaaaactctattacagaaaaaactgatctgaccatgtccactgcagcttgtccaccttcctatgaccgggtgacaaagccaattgtggaaaaacatgagcaagaaggcaaagatgaaaaagccaaagggaaataaatgaaaataaataaaaataattgggtgacaaattgtttacagcctgtgaaggtgatgtatttttatcaacaggactcctttaggaggtcaatgccaaactgactgtttttacacaaatctccttaaggtcagtgcctacaataagacagtgaccccttgtcagcaaactgtgactctgtgtaaaggggagatgaccttgacaggaggttactgttctcactaccagctgacactgctgaagataagatgcacaatggctagtcagactgtagggaccagtttcaaggggtgcaaacctgtgattttggggttgtttaacatgaaacactttagtgtagtaattgtatccactgtttgcatttcaactgccacatttgtcacatttttatggaatctgttagtggattcatctttttgttaatccatgtgtttattatatgtgactatttttgtaaacgaagtttctgttgagaaataggctaaggacctctataacaggtatgccacctggggggtatggcaaccacatggccctcccagctacacaaagtcgtggtttgcatgagggcatgctgcacttagagatcatgcatgagaaaaagtcacaagaaaaacaaattcttaaatttcaccatatttctgggaggggtaattgggtgataagtggaggtgctttgttgatcttgttttgcgaaatccagcccctagaccaagtagattatttgtgggtaggccagtaaatcttagcaggtgcaaacttcattcaaatgtttggagtcataaatgttatgtttctttttgttgtattaaaaaaaaaacctgaatagtgaatattgcccctcaccctccaccgccagaagactgaattgaccaaaattactctttataaatttctgctttttcctgcactttgtttagccatcttcggctctcagcaaggttgacactgtatatgttaatgaaatgctatttattatgtaaatagtcattttaccctgtggtgcacgtttgagcaaacaaataatgacctaagcacagtatttattgcatcaaatatgtaccacaagaaatgtagagtgcaagctttacacaggtaataaaatgtattctgtaccatttatagatagtttggatgctatcaatgcatgtttatattaccatgctgctgtatctggtttctctcactgctcagaatctcatttatgagaaaccatatgtcagtggtaaagtcaaggaaattgttcaacagatctcatttatttaagtcattaagcaatagtttgcagcactttaacagctttttggttatttttacattttaagtggataacatatggtatatagccagactgtacagacatgtttaaaaaaacacactgcttaacctattaaatatgtgtttagaattttataagcaaatataaatactgtaaaaagtcactttattttatttttcagcattatgtacataaatatgaagaggaaattatcttcaggttgatatcacaatcacttttcttactttctgtccatagtactttttcatgaaagaaatttgctaaataagacatgaaaacaagactgggtagttgtagatttctgctttttaaattacatttgctaattttagattatttcacaattttaaggagcaaaataggttcacgattcatatccaaattatgctttgcaattggaaaagggtttaaaattttatttatatttctggtagtacctgcactaactgaattgaaggtagtgcttatgttatttttgttctttttttctgacttcggtttatgttttcatttctttggagtaatgctgctctagattgttctaaatagaatgtgggcttcataatttttttttccacaaaaacagagtagtcaacttatatagtcaattacatcaggacattttgtgtttcttacagaagcaaaccataggctcctcttttccttaaaactacttagataaactgtattcgtgaactgcatgctggaaaatgctactattatgctaaataatgctaaccaacatttaaaatgtgcaaaactaataaagattacattttttattttattgtttgcccagtcactttttgttaacagaatattctaatgatatggagattttttacattacaaattgggggagaaggggagcgcgcgcgcacacacacacacacacacacacacacacacacacacacagaggcatacccacgttgacaacaaaacctagggtagatatgtcactggaggtagggggtaatgacctcccagaattacaagcagcaggtgtgttctctgttaggaggaagaactggtgtcagaggatagctagtgattctaggaggaagagaagtatggaagccagagtgatggtggatgaccccttgagctatgaaaagaaacccttaaatcatcatttaaaaatttagaattgccatgtgtgtaggatactgtgtttgctcctccagagccactctctctgcttctgcatcattctgtgtgtcccagaagggtgacttctacacattgcaaaaatgggctctcctacctttgagctcccaattggtttggccaatgagaagcaccagtgggaaagcaccagagagagaagattgacataggaatatttcttctccaattccttctttgctgggttggcactggactcattcctccccgaaaagtcatactccaatcagactgcccctcatacaactgaagctactttctctggggtcaggtaatcactcctccccttgctccttcaggtctgctgctgcattgagagtgcttttgtattccttgtagctttctcctaacattgctgacacttttgtaaatgtccccttcatgaaattcttctatatgcctcatttcagcatgccatctgtctcctgcctggctgacacaaggtgattcaacagctcatgaaagtcagcaggaagcaaagatgtgccttgcttcagcttggggtcttaatcttgctaacttttgcagataaagaaaaacagtaactgggggaaccacagtgaagtccagtgcagaattcacagatatcatggaaaggttactcgggtggtccagatagtaaaattaacagtctaaattaatctatctaaatttctgaggaacgagaagccttcccttgtcatcaggtgaagccagaagagggaatatagcctcaaccagaaaagggacagtaattaaaaggcttttcccatccttgtacaatggactgactttgcctcttcataacatcacaatcctaaagcaacacaacaattaattctgatatattagtagctgaaaaaaattcccatttccaactaaggtaggtcagaattataggataaaccctgcagactttttatactacccatccacgccattactcactgttacctttccaaatacaaagagaagaactggtaaaacataatcatataaatctccatattcattttgaaatatttggcatgatattttctgtgctaaaaagtaattattcttcaaagaatgatgaggtcatgtcagtaagacacaggaaccaactagaaggggcttcccactggccaaatctggggcaagttgagcatcaaaataaatgatagtaaaagattataattcattgaataagaatcagcaaatacatactgatgtaagtaaataaggaaaagtacaaatctgtttcttgcagttgaatgttaattaacaattgtagaagaaataacggagttagaaaaatcactatttggcaatcaccctaatgacaattgattcatacaagaatcatcaatgagtattaaaactcatgggtgaaagtttgatgaggaatagggtatttatagcatcttaaagtatctcttctctattaagtagaaaatttaaacagaagaaagtatactttggagaaatacagcagacaataccttcaaagatatcatcaattatgagaccaactgatactatgtgcctcctgataagatatactgaaagggccacattacttcttggtacacagtcaaaattttaaaaccagaatctaactacaaggaaaatcaaattgaggacactctataaaataagtggactgaactccttaaaaatgtcaatgtcatgaaagacaaagaaaggctaaagaattccatgaggtcaaagaactatgacaactaaacacaattctggatggaatatcaaattaaaaaataacagataaataatattattgggaaagttgaataaatttgaatatggactgtttattagttattagtattataatagtgttaattttcctaattttgttaagactagtgtgcctgttccatgaaaatagaaaatgttcttattctctgaaaatgcatgctaaagtatttaggggtgaatgcaacaatgtctgcagctcattcttgaatcagttcaaagaaaaatgagttacatttatatatatatgtatgtatgtaaacagacatagataaaagtatagatgtgtgtgtgtctttagaaaggggaggattttttttttttttttgctgtgtgttactgaagtgcctatgtctgcgtgttcacactatcatattttgtatgccctggactttataatttctaccttcaaaattagatctactgttggtaattaattcaatatatactggttttttaactactattctcatttcctagcagtaatcttcctgaaaagtcacagaaatgattacattccttgttcttcataataatcactgtttaattaaaataagaatattttagaaaagatctgcggcatagtggttaagaccccagtatttgatgctaaacagatctgatttggataacagaaggtggcactttgctgtttaagctggggaccagacactgtgggtataaatagtaattccaaacacagctccacagagcagcacccttatgacaaggttttcatatgtctatagttaagccagaaaattaagaataatgccataaatatttataaagctgaacatatccaagttaaagacctttatcctgaaattgtatcttttagattattttctaaagactaataccatttaatgtttaaatgttctttggaaatgatggtgagaatacgtgataatgggtcattggttttaatattttatttagccaagtggaaaattggcaacctggtgtcggtcctcccatttgtattttactggtgcatgaaatccaaaagtctagtaaccattgggacagacaactctactgcataagtttgtatgtttgtatatctgtatcacaaagcccagacactcgaactatataaacttgtcgcactaaagacagcaaatatgtctggtaattgcatattcttcatgtgtgcactggaatttcttattatataagaaaataaatgtgtttctaaaccaccatgaattgggtactgctgatagtactattcttcctggcacatggaaatatcccactgaggttgtcaatcaatattgatttaatcagtgtggcagcaaaggcactagaggaggaaaatactctagacaatcaagtatagatgggaaaattgcatcaccaagaaattcttaaaatcacaagtggataatttgcaatatcaattgattttactcaactgcttgagtcctttatcattccgttagaacactcctcatatttgcagataactcagcccctcacctcagcaacaagcaagaggacatcattataaacttcctcaatttctttcctatccagtgaaaaatatctaagtcccttttcccttcccttttccttcccttcccttcctttttctttccttccattctcttcctttttccttcctttttctttccttccattctcttcctttttccttcctttttcttactttacctccccctcctacctttccctttctcccttcctccctctctcccttccttcctctctccctctccttccttccttccttcaatccatacttttatatcttttcagagatcaatttttcccattcatttctacattctcagataccttgctccatgacttgttctacttctcttctatctttattctttccctcttgactgatcctttttgtctgcctttgcattttcaaaatcagtttttctaatcttaaaaaataactttgctcaaccctgatgcatctttattcactgtgtcattatctcattatttttaaaggttagtttctaaagccagggctctatactcactaccttcactcttggttaaaattaaaagaaatataggtcccagtgatatttatgggaaaatttgactgtgaataatcttgttgatataaacactttgggttttcaaaatgttatgctagctgttaactttcccagtaacattatgagggaagggctggaaaatacaaaaggtagacataggaaccgagaacaccacccctatggagccaagctatacatactctgtctctggttatcataaatacatctcctatattcaatgcttgcttagaaaggcatgatgtccacggagcaattcaattgttcactgtgatgggtttttttgttttctcctcatggaatgcaacttttatttat

SEQ ID NO: 552 - DNA, 12849 bp, Homo sapiens
  source 1..12849: mol_type = genomic DNA
accatagagtgaggcgaggatgaagccgagaggatactgcagaggtctctggtgcatgtgtgtatgtgtgcgtttgtgtgtgtttgtgtgtctgtgtgttctgccccagtgagactgcagcccttgtaaatactttgacaccttttgcaagaaggaatctgaacaattgcaactgaaggcacattgttatcatctcgtctttgggtgatgctgttcctcactgcagatggataattttccttttaatcaggaatttcatatgcagaataaatggtaattaaaatgtgcaggatgacaagatggagcaaacagtgcttgtaccaccaggacctgacagcttcaacttcttcaccagagaatctcttgcggctattgaaagacgcattgcagaagaaaaggcaaagaatcccaaaccagacaaaaaagatgacgacgaaaatggcccaaagccaaatagtgacttggaagctggaaagaaccttccatttatttatggagacattcctccagagatggtgtcagagcccctggaggacctggacccctactatatcaataagaaaacttttatagtattgaataaagggaaggccatcttccggttcagtgccacctctgccctgtacattttaactcccttcaatcctcttaggaaaatagctattaagattttggtacattcattattcagcatgctaattatgtgcactattttgacaaactgtgtgtttatgacaatgagtaaccctcctgattggacaaagaatgtagaatacaccttcacaggaatatatacttttgaatcacttataaaaattattgcaaggggattctgtttagaagattttactttccttcgggatccatggaactggctcgatttcactgtcattacatttgcgtacgtcacagagtttgtggacctgggcaatgtctcggcattgagaacattcagagttctccgagcattgaagacgatttcagtcattccaggcctgaaaaccattgtgggagccctgatccagtctgtgaagaagctctcagatgtaatgatcctgactgtgttctgtctgagcgtatttgctctaattgggctgcagctgttcatgggcaacctgaggaataaatgtatacaatggcctcccaccaatgcttccttggaggaacatagtatagaaaagaatataactgtgaattataatggtacacttataaatgaaactgtctttgagtttgactggaagtcatatattcaagattcaagatatcattatttcctggagggttttttagatgcactactatgtggaaatagctctgatgcaggccaatgtccagagggatatatgtgtgtgaaagctggtagaaatcccaattatggctacacaagctttgataccttcagttgggcttttttgtccttgtttcgactaatgactcaggacttctgggaaaatctttatcaactgacattacgtgctgctgggaaaacgtacatgatattttttgtattggtcattttcttgggctcattctacctaataaatttgatcctggctgtggtggccatggcctacgaggaacagaatcaggccaccttggaagaagcagaacagaaagaggccgaatttcagcagatgattgaacagcttaaaaagcaacaggaggcagctcagcaggcagcaacggcaactgcctcagaacattccagagagcccagtgcagcaggcaggctctcagacagctcatctgaagcctctaagttgagttccaagagtgctaaggaaagaagaaatcggaggaagaaaagaaaacagaaagagcagtctggtggggaagagaaagatgaggatgaattccaaaaatctgaatctgaggacagcatcaggaggaaaggttttcgcttctccattgaagggaaccgattgacatatgaaaagaggtactcctccccacaccagtctttgttgagcatccgtggctccctattttcaccaaggcgaaatagcagaacaagccttttcagctttagagggcgagcaaaggatgtgggatctgagaacgacttcgcagatgatgagcacagcacctttgaggataacgagagccgtagagattccttgtttgtgccccgacgacacggagagagacgcaacagcaacctgagtcagaccagtaggtcatcccggatgctggcagtgtttccagcgaatgggaagatgcacagcactgtggattgcaatggtgtggtttccttgggaacaaccactgaaactgaaatgagaaagagaaggtcaagttctttccacgtttccatggactttctagaagatccttcccaaaggcaacgagcaatgagtatagccagcattctaacaaatacagtagaagaacttgaagaatccaggcagaaatgcccaccctgttggtataaattttccaacatattcttaatctgggactgttctccatattggttaaaagtgaaacatgttgtcaacctggttgtgatggacccatttgttgacctggccatcaccatctgtattgtcttaaatactcttttcatggccatggagcactatccaatgacggaccatttcaataatgtgcttacagtaggaaacttggttttcactgggatctttacagcagaaatgtttctgaaaattattgccatggatccttactattatttccaagaaggctggaatatctttgacggttttattgtgacgcttagcctggtagaacttggactcgccaatgtggaaggattatctgttctccgttcatttcgattgctgcgagttttcaagttggcaaaatcttggccaacgttaaatatgctaataaagatcatcggcaattccgtgggggctctgggaaatttaaccctcgtcttggccatcatcgtcttcatttttgccgtggtcggcatgcagctctttggtaaaagctacaaagattgtgtctgcaagatcgccagtgattgtcaactcccacgctggcacatgaatgacttcttccactccttcctgattgtgttccgcgtgctgtgtggggagtggatagagaccatgtgggactgtatggaggttgctggtcaagccatgtgccttactgtcttcatgatggtcatggtgattggaaacctagtggtcctgaatctctttctggccttgcttctgagctcatttagtgcagacaaccttgcagccactgatgatgataatgaaatgaataatctccaaattgctgtggataggatgcacaaaggagtagcttatgtgaaaagaaaaatatatgaatttattcaacagtccttcattaggaaacaaaagattttagatgaaattaaaccacttgatgatctaaacaacaagaaagacagttgtatgtccaatcatacagcagaaattgggaaagatcttgactatcttaaagatgtaaatggaactacaagtggtataggaactggcagcagtgttgaaaaatacattattgatgaaagtgattacatgtcattcataaacaaccccagtcttactgtgactgtaccaattgctgtaggagaatctgactttgaaaatttaaacacggaagactttagtagtgaatcggatctggaagaaagcaaagagaaactgaatgaaagcagtagctcatcagaaggtagcactgtggacatcggcgcacctgtagaagaacagcccgtagtggaacctgaagaaactcttgaaccagaagcttgtttcactgaaggctgtgtacaaagattcaagtgttgtcaaatcaatgtggaagaaggcagaggaaaacaatggtggaacctgagaaggacgtgtttccgaatagttgaacataactggtttgagaccttcattgttttcatgattctccttagtagtggtgctctggcatttgaagatatatatattgatcagcgaaagacgattaagacgatgttggaatatgctgacaaggttttcacttacattttcattctggaaatgcttctaaaatgggtggcatatggctatcaaacatatttcaccaatgcctggtgttggctggacttcttaattgttgatgtttcattggtcagtttaacagcaaatgccttgggttactcagaacttggagccatcaaatctctcaggacactaagagctctgagacctctaagagccttatctcgatttgaagggatgagggtggttgtgaatgcccttttaggagcaattccatccatcatgaatgtgcttctggtttgtcttatattctggctaattttcagcatcatgggcgtaaatttgtttgctggcaaattctaccactgtattaacaccacaactggtgacaggtttgacatcgaagacgtgaataatcatactgattgcctaaaactaatagaaagaaatgagactgctcgatggaaaaatgtgaaagtaaactttgataatgtaggatttgggtatctctctttgcttcaagttgccacattcaaaggatggatggatataatgtatgcagcagttgattccagaaatgtggaactccagcctaagtatgaagaaagtctgtacatgtatctttactttgttattttcatcatctttgggtccttcttcaccttgaacctgtttattggtgtcatcatagataatttcaaccagcagaaaaagaagtttggaggtcaagacatctttatgacagaagaacagaagaaatactataatgcaatgaaaaaattaggatcgaaaaaaccgcaaaagcctatacctcgaccaggaaacaaatttcaaggaatggtctttgacttcgtaaccagacaagtttttgacataagcatcatgattctcatctgtcttaacatggtcacaatgatggtggaaacagatgaccagagtgaatatgtgactaccattttgtcacgcatcaatctggtgttcattgtgctatttactggagagtgtgtactgaaactcatctctctacgccattattattttaccattggatggaatatttttgattttgtggttgtcattctctccattgtaggtatgtttcttgccgagctgatagaaaagtatttcgtgtcccctaccctgttccgagtgatccgtcttgctaggattggccgaatcctacgtctgatcaaaggagcaaaggggatccgcacgctgctctttgctttgatgatgtcccttcctgcgttgtttaacatcggcctcctactcttcctagtcatgttcatctacgccatctttgggatgtccaactttgcctatgttaagagggaagttgggatcgatgacatgttcaactttgagacctttggcaacagcatgatctgcctattccaaattacaacctctgctggctgggatggattgctagcacccattctcaacagtaagccacccgactgtgaccctaataaagttaaccctggaagctcagttaagggagactgtgggaacccatctgttggaattttcttttttgtcagttacatcatcatatccttcctggttgtggtgaacatgtacatcgcggtcatcctggagaacttcagtgttgctactgaagaaagtgcagagcctctgagtgaggatgactttgagatgttctatgaggtttgggagaagtttgatcccgatgcaactcagttcatggaatttgaaaaattatctcagtttgcagctgcgcttgaaccgcctctcaatctgccacaaccaaacaaactccagctcattgccatggatttgcccatggtgagtggtgaccggatccactgtcttgatatcttatttgcttttacaaagcgggttctaggagagagtggagagatggatgctctacgaatacagatggaagagcgattcatggcttccaatccttccaaggtctcctatcagccaatcactactactttaaaacgaaaacaagaggaagtatctgctgtcattattcagcgtgcttacagacgccaccttttaaagcgaactgtaaaacaagcttcctttacgtacaataaaaacaaaatcaaaggtggggctaatcttcttataaaagaagacatgataattgacagaataaatgaaaactctattacagaaaaaactgatctgaccatgtccactgcagcttgtccaccttcctatgaccgggtgacaaagccaattgtggaaaaacatgagcaagaaggcaaagatgaaaaagccaaagggaaataaatgaaaataaataaaaataattgggtgacaaattgtttacagcctgtgaaggtgatgtatttttatcaacaggactcctttaggaggtcaatgccaaactgactgtttttacacaaatctccttaaggtcagtgcctacaataagacagtgaccccttgtcagcaaactgtgactctgtgtaaaggggagatgaccttgacaggaggttactgttctcactaccagctgacactgctgaagataagatgcacaatggctagtcagactgtagggaccagtttcaaggggtgcaaacctgtgattttggggttgtttaacatgaaacactttagtgtagtaattgtatccactgtttgcatttcaactgccacatttgtcacatttttatggaatctgttagtggattcatctttttgttaatccatgtgtttattatatgtgactatttttgtaaacgaagtttctgttgagaaataggctaaggacctctataacaggtatgccacctggggggtatggcaaccacatggccctcccagctacacaaagtcgtggtttgcatgagggcatgctgcacttagagatcatgcatgagaaaaagtcacaagaaaaacaaattcttaaatttcaccatatttctgggaggggtaattgggtgataagtggaggtgctttgttgatcttgttttgcgaaatccagcccctagaccaagtagattatttgtgggtaggccagtaaatcttagcaggtgcaaacttcattcaaatgtttggagtcataaatgttatgtttctttttgttgtattaaaaaaaaaacctgaatagtgaatattgcccctcaccctccaccgccagaagactgaattgaccaaaattactctttataaatttctgctttttcctgcactttgtttagccatcttcggctctcagcaaggttgacactgtatatgttaatgaaatgctatttattatgtaaatagtcattttaccctgtggtgcacgtttgagcaaacaaataatgacctaagcacagtatttattgcatcaaatatgtaccacaagaaatgtagagtgcaagctttacacaggtaataaaatgtattctgtaccatttatagatagtttggatgctatcaatgcatgtttatattaccatgctgctgtatctggtttctctcactgctcagaatctcatttatgagaaaccatatgtcagtggtaaagtcaaggaaattgttcaacagatctcatttatttaagtcattaagcaatagtttgcagcactttaacagctttttggttatttttacattttaagtggataacatatggtatatagccagactgtacagacatgtttaaaaaaacacactgcttaacctattaaatatgtgtttagaattttataagcaaatataaatactgtaaaaagtcactttattttatttttcagcattatgtacataaatatgaagaggaaattatcttcaggttgatatcacaatcacttttcttactttctgtccatagtactttttcatgaaagaaatttgctaaataagacatgaaaacaagactgggtagttgtagatttctgctttttaaattacatttgctaattttagattatttcacaattttaaggagcaaaataggttcacgattcatatccaaattatgctttgcaattggaaaagggtttaaaattttatttatatttctggtagtacctgcactaactgaattgaaggtagtgcttatgttatttttgttctttttttctgacttcggtttatgttttcatttctttggagtaatgctgctctagattgttctaaatagaatgtgggcttcataatttttttttccacaaaaacagagtagtcaacttatatagtcaattacatcaggacattttgtgtttcttacagaagcaaaccataggctcctcttttccttaaaactacttagataaactgtattcgtgaactgcatgctggaaaatgctactattatgctaaataatgctaaccaacatttaaaatgtgcaaaactaataaagattacattttttattttattgtttgcccagtcactttttgttaacagaatattctaatgatatggagattttttacattacaaattgggggagaaggggagcgcgcgcgcacacacacacacacacacacacacacacacacacacacagaggcatacccacgttgacaacaaaacctagggtagatatgtcactggaggtagggggtaatgacctcccagaattacaagcagcaggtgtgttctctgttaggaggaagaactggtgtcagaggatagctagtgattctaggaggaagagaagtatggaagccagagtgatggtggatgaccccttgagctatgaaaagaaacccttaaatcatcatttaaaaatttagaattgccatgtgtgtaggatactgtgtttgctcctccagagccactctctctgcttctgcatcattctgtgtgtcccagaagggtgacttctacacattgcaaaaatgggctctcctacctttgagctcccaattggtttggccaatgagaagcaccagtgggaaagcaccagagagagaagattgacataggaatatttcttctccaattccttctttgctgggttggcactggactcattcctccccgaaaagtcatactccaatcagactgcccctcatacaactgaagctactttctctggggtcaggtaatcactcctccccttgctccttcaggtctgctgctgcattgagagtgcttttgtattccttgtagctttctcctaacattgctgacacttttgtaaatgtccccttcatgaaattcttctatatgcctcatttcagcatgccatctgtctcctgcctggctgacacaaggtgattcaacagctcatgaaagtcagcaggaagcaaagatgtgccttgcttcagcttggggtcttaatcttgctaacttttgcagataaagaaaaacagtaactgggggaaccacagtgaagtccagtgcagaattcacagatatcatggaaaggttactcgggtggtccagatagtaaaattaacagtctaaattaatctatctaaatttctgaggaacgagaagccttcccttgtcatcaggtgaagccagaagagggaatatagcctcaaccagaaaagggacagtaattaaaaggcttttcccatccttgtacaatggactgactttgcctcttcataacatcacaatcctaaagcaacacaacaattaattctgatatattagtagctgaaaaaaattcccatttccaactaaggtaggtcagaattataggataaaccctgcagactttttatactacccatccacgccattactcactgttacctttccaaatacaaagagaagaactggtaaaacataatcatataaatctccatattcattttgaaatatttggcatgatattttctgtgctaaaaagtaattattcttcaaagaatgatgaggtcatgtcagtaagacacaggaaccaactagaaggggcttcccactggccaaatctggggcaagttgagcatcaaaataaatgatagtaaaagattataattcattgaataagaatcagcaaatacatactgatgtaagtaaataaggaaaagtacaaatctgtttcttgcagttgaatgttaattaacaattgtagaagaaataacggagttagaaaaatcactatttggcaatcaccctaatgacaattgattcatacaagaatcatcaatgagtattaaaactcatgggtgaaagtttgatgaggaatagggtatttatagcatcttaaagtatctcttctctattaagtagaaaatttaaacagaagaaagtatactttggagaaatacagcagacaataccttcaaagatatcatcaattatgagaccaactgatactatgtgcctcctgataagatatactgaaagggccacattacttcttggtacacagtcaaaattttaaaaccagaatctaactacaaggaaaatcaaattgaggacactctataaaataagtggactgaactccttaaaaatgtcaatgtcatgaaagacaaagaaaggctaaagaattccatgaggtcaaagaactatgacaactaaacacaattctggatggaatatcaaattaaaaaataacagataaataatattattgggaaagttgaataaatttgaatatggactgtttattagttattagtattataatagtgttaattttcctaattttgttaagactagtgtgcctgttccatgaaaatagaaaatgttcttattctctgaaaatgcatgctaaagtatttaggggtgaatgcaacaatgtctgcagctcattcttgaatcagttcaaagaaaaatgagttacatttatatatatatgtatgtatgtaaacagacatagataaaagtatagatgtgtgtgtgtctttagaaaggggaggattttttttttttttttgctgtgtgttactgaagtgcctatgtctgcgtgttcacactatcatattttgtatgccctggactttataatttctaccttcaaaattagatctactgttggtaattaattcaatatatactggttttttaactactattctcatttcctagcagtaatcttcctgaaaagtcacagaaatgattacattccttgttcttcataataatcactgtttaattaaaataagaatattttagaaaagatctgcggcatagtggttaagaccccagtatttgatgctaaacagatctgatttggataacagaaggtggcactttgctgtttaagctggggaccagacactgtgggtataaatagtaattccaaacacagctccacagagcagcacccttatgacaaggttttcatatgtctatagttaagccagaaaattaagaataatgccataaatatttataaagctgaacatatccaagttaaagacctttatcctgaaattgtatcttttagattattttctaaagactaataccatttaatgtttaaatgttctttggaaatgatggtgagaatacgtgataatgggtcattggttttaatattttatttagccaagtggaaaattggcaacctggtgtcggtcctcccatttgtattttactggtgcatgaaatccaaaagtctagtaaccattgggacagacaactctactgcataagtttgtatgtttgtatatctgtatcacaaagcccagacactcgaactatataaacttgtcgcactaaagacagcaaatatgtctggtaattgcatattcttcatgtgtgcactggaatttcttattatataagaaaataaatgtgtttctaaaccaccatgaattgggtactgctgatagtactattcttcctggcacatggaaatatcccactgaggttgtcaatcaatattgatttaatcagtgtggcagcaaaggcactagaggaggaaaatactctagacaatcaagtatagatgggaaaattgcatcaccaagaaattcttaaaatcacaagtggataatttgcaatatcaattgattttactcaactgcttgagtcctttatcattccgttagaacactcctcatatttgcagataactcagcccctcacctcagcaacaagcaagaggacatcattataaacttcctcaatttctttcctatccagtgaaaaatatctaagtcccttttcccttcccttttccttcccttcccttcctttttctttccttccattctcttcctttttccttcctttttctttccttccattctcttcctttttccttcctttttcttactttacctccccctcctacctttccctttctcccttcctccctctctcccttccttcctctctccctctccttccttccttccttcaatccatacttttatatcttttcagagatcaatttttcccattcatttctacattctcagataccttgctccatgacttgttctacttctcttctatctttattctttccctcttgactgatcctttttgtctgcctttgcattttcaaaatcagtttttctaatcttaaaaaataactttgctcaaccctgatgcatctttattcactgtgtcattatctcattatttttaaaggttagtttctaaagccagggctctatactcactaccttcactcttggttaaaattaaaagaaatataggtcccagtgatatttatgggaaaatttgactgtgaataatcttgttgatataaacactttgggttttcaaaatgttatgctagctgttaactttcccagtaacattatgagggaagggctggaaaatacaaaaggtagacataggaaccgagaacaccacccctatggagccaagctatacatactctgtctctggttatcataaatacatctcctatattcaatgcttgcttagaaaggcatgatgtccacggagcaattcaattgttcactgtgatgggtttttttgttttctcctcatggaatgcaacttttatttat

SEQ ID NO: 553 - DNA, 12900 bp, Homo sapiens
  source 1..12900: mol_type = genomic DNA
accatagagtgaggcgaggatgaagccgagaggatactgcagaggtctctggtgcatgtgtgtatgtgtgcgtttgtgtgtgtttgtgtgtctgtgtgttctgccccagtgagactgcagcccttgtaaatactttgacaccttttgcaagaaggaatctgaacaattgcaactgaaggcacattgttatcatctcgtctttgggtgatgctgttcctcactgcagatggataattttccttttaatcaggaatttcatatgcagaataaatggtaattaaaatgtgcaggatgacaagatggagcaaacagtgcttgtaccaccaggacctgacagcttcaacttcttcaccagagaatctcttgcggctattgaaagacgcattgcagaagaaaaggcaaagaatcccaaaccagacaaaaaagatgacgacgaaaatggcccaaagccaaatagtgacttggaagctggaaagaaccttccatttatttatggagacattcctccagagatggtgtcagagcccctggaggacctggacccctactatatcaataagaaaacttttatagtattgaataaagggaaggccatcttccggttcagtgccacctctgccctgtacattttaactcccttcaatcctcttaggaaaatagctattaagattttggtacattcattattcagcatgctaattatgtgcactattttgacaaactgtgtgtttatgacaatgagtaaccctcctgattggacaaagaatgtagaatacaccttcacaggaatatatacttttgaatcacttataaaaattattgcaaggggattctgtttagaagattttactttccttcgggatccatggaactggctcgatttcactgtcattacatttgcgtacgtcacagagtttgtggacctgggcaatgtctcggcattgagaacattcagagttctccgagcattgaagacgatttcagtcattccaggcctgaaaaccattgtgggagccctgatccagtctgtgaagaagctctcagatgtaatgatcctgactgtgttctgtctgagcgtatttgctctaattgggctgcagctgttcatgggcaacctgaggaataaatgtatacaatggcctcccaccaatgcttccttggaggaacatagtatagaaaagaatataactgtgaattataatggtacacttataaatgaaactgtctttgagtttgactggaagtcatatattcaagattcaagatatcattatttcctggagggttttttagatgcactactatgtggaaatagctctgatgcaggccaatgtccagagggatatatgtgtgtgaaagctggtagaaatcccaattatggctacacaagctttgataccttcagttgggcttttttgtccttgtttcgactaatgactcaggacttctgggaaaatctttatcaactgacattacgtgctgctgggaaaacgtacatgatattttttgtattggtcattttcttgggctcattctacctaataaatttgatcctggctgtggtggccatggcctacgaggaacagaatcaggccaccttggaagaagcagaacagaaagaggccgaatttcagcagatgattgaacagcttaaaaagcaacaggaggcagctcagcaggcagcaacggcaactgcctcagaacattccagagagcccagtgcagcaggcaggctctcagacagctcatctgaagcctctaagttgagttccaagagtgctaaggaaagaagaaatcggaggaagaaaagaaaacagaaagagcagtctggtggggaagagaaagatgaggatgaattccaaaaatctgaatctgaggacagcatcaggaggaaaggttttcgcttctccattgaagggaaccgattgacatatgaaaagaggtactcctccccacaccagtctttgttgagcatccgtggctccctattttcaccaaggcgaaatagcagaacaagccttttcagctttagagggcgagcaaaggatgtgggatctgagaacgacttcgcagatgatgagcacagcacctttgaggataacgagagccgtagagattccttgtttgtgccccgacgacacggagagagacgcaacagcaacctgagtcagaccagtaggtcatcccggatgctggcagtgtttccagcgaatgggaagatgcacagcactgtggattgcaatggtgtggtttccttggttggtggaccttcagttcctacatcgcctgttggacagcttctgccagagggaacaaccactgaaactgaaatgagaaagagaaggtcaagttctttccacgtttccatggactttctagaagatccttcccaaaggcaacgagcaatgagtatagccagcattctaacaaatacagtagaagaacttgaagaatccaggcagaaatgcccaccctgttggtataaattttccaacatattcttaatctgggactgttctccatattggttaaaagtgaaacatgttgtcaacctggttgtgatggacccatttgttgacctggccatcaccatctgtattgtcttaaatactcttttcatggccatggagcactatccaatgacggaccatttcaataatgtgcttacagtaggaaacttggttttcactgggatctttacagcagaaatgtttctgaaaattattgccatggatccttactattatttccaagaaggctggaatatctttgacggttttattgtgacgcttagcctggtagaacttggactcgccaatgtggaaggattatctgttctccgttcatttcgattgctgcgagttttcaagttggcaaaatcttggccaacgttaaatatgctaataaagatcatcggcaattccgtgggggctctgggaaatttaaccctcgtcttggccatcatcgtcttcatttttgccgtggtcggcatgcagctctttggtaaaagctacaaagattgtgtctgcaagatcgccagtgattgtcaactcccacgctggcacatgaatgacttcttccactccttcctgattgtgttccgcgtgctgtgtggggagtggatagagaccatgtgggactgtatggaggttgctggtcaagccatgtgccttactgtcttcatgatggtcatggtgattggaaacctagtggtcctgaatctctttctggccttgcttctgagctcatttagtgcagacaaccttgcagccactgatgatgataatgaaatgaataatctccaaattgctgtggataggatgcacaaaggagtagcttatgtgaaaagaaaaatatatgaatttattcaacagtccttcattaggaaacaaaagattttagatgaaattaaaccacttgatgatctaaacaacaagaaagacagttgtatgtccaatcatacagcagaaattgggaaagatcttgactatcttaaagatgtaaatggaactacaagtggtataggaactggcagcagtgttgaaaaatacattattgatgaaagtgattacatgtcattcataaacaaccccagtcttactgtgactgtaccaattgctgtaggagaatctgactttgaaaatttaaacacggaagactttagtagtgaatcggatctggaagaaagcaaagagaaactgaatgaaagcagtagctcatcagaaggtagcactgtggacatcggcgcacctgtagaagaacagcccgtagtggaacctgaagaaactcttgaaccagaagcttgtttcactgaaggctgtgtacaaagattcaagtgttgtcaaatcaatgtggaagaaggcagaggaaaacaatggtggaacctgagaaggacgtgtttccgaatagttgaacataactggtttgagaccttcattgttttcatgattctccttagtagtggtgctctggcatttgaagatatatatattgatcagcgaaagacgattaagacgatgttggaatatgctgacaaggttttcacttacattttcattctggaaatgcttctaaaatgggtggcatatggctatcaaacatatttcaccaatgcctggtgttggctggacttcttaattgttgatgtttcattggtcagtttaacagcaaatgccttgggttactcagaacttggagccatcaaatctctcaggacactaagagctctgagacctctaagagccttatctcgatttgaagggatgagggtggttgtgaatgcccttttaggagcaattccatccatcatgaatgtgcttctggtttgtcttatattctggctaattttcagcatcatgggcgtaaatttgtttgctggcaaattctaccactgtattaacaccacaactggtgacaggtttgacatcgaagacgtgaataatcatactgattgcctaaaactaatagaaagaaatgagactgctcgatggaaaaatgtgaaagtaaactttgataatgtaggatttgggtatctctctttgcttcaagttgccacattcaaaggatggatggatataatgtatgcagcagttgattccagaaatgtggaactccagcctaagtatgaagaaagtctgtacatgtatctttactttgttattttcatcatctttgggtccttcttcaccttgaacctgtttattggtgtcatcatagataatttcaaccagcagaaaaagaagtttggaggtcaagacatctttatgacagaagaacagaagaaatactataatgcaatgaaaaaattaggatcgaaaaaaccgcaaaagcctatacctcgaccaggaaacaaatttcaaggaatggtctttgacttcgtaaccagacaagtttttgacataagcatcatgattctcatctgtcttaacatggtcacaatgatggtggaaacagatgaccagagtgaatatgtgactaccattttgtcacgcatcaatctggtgttcattgtgctatttactggagagtgtgtactgaaactcatctctctacgccattattattttaccattggatggaatatttttgattttgtggttgtcattctctccattgtaggtatgtttcttgccgagctgatagaaaagtatttcgtgtcccctaccctgttccgagtgatccgtcttgctaggattggccgaatcctacgtctgatcaaaggagcaaaggggatccgcacgctgctctttgctttgatgatgtcccttcctgcgttgtttaacatcggcctcctactcttcctagtcatgttcatctacgccatctttgggatgtccaactttgcctatgttaagagggaagttgggatcgatgacatgttcaactttgagacctttggcaacagcatgatctgcctattccaaattacaacctctgctggctgggatggattgctagcacccattctcaacagtaagccacccgactgtgaccctaataaagttaaccctggaagctcagttaagggagactgtgggaacccatctgttggaattttcttttttgtcagttacatcatcatatccttcctggttgtggtgaacatgtacatcgcggtcatcctggagaacttcagtgttgctactgaagaaagtgcagagcctctgagtgaggatgactttgagatgttctatgaggtttgggagaagtttgatcccgatgcaactcagttcatggaatttgaaaaattatctcagtttgcagctgcgcttgaaccgcctctcaatctgccacaaccaaacaaactccagctcattgccatggatttgcccatggtgagtggtgaccggatccactgtcttgatatcttatttgcttttacaaagcgggttctaggagagagtggagagatggatgctctacgaatacagatggaagagcgattcatggcttccaatccttccaaggtctcctatcagccaatcactactactttaaaacgaaaacaagaggaagtatctgctgtcattattcagcgtgcttacagacgccaccttttaaagcgaactgtaaaacaagcttcctttacgtacaataaaaacaaaatcaaaggtggggctaatcttcttataaaagaagacatgataattgacagaataaatgaaaactctattacagaaaaaactgatctgaccatgtccactgcagcttgtccaccttcctatgaccgggtgacaaagccaattgtggaaaaacatgagcaagaaggcaaagatgaaaaagccaaagggaaataaatgaaaataaataaaaataattgggtgacaaattgtttacagcctgtgaaggtgatgtatttttatcaacaggactcctttaggaggtcaatgccaaactgactgtttttacacaaatctccttaaggtcagtgcctacaataagacagtgaccccttgtcagcaaactgtgactctgtgtaaaggggagatgaccttgacaggaggttactgttctcactaccagctgacactgctgaagataagatgcacaatggctagtcagactgtagggaccagtttcaaggggtgcaaacctgtgattttggggttgtttaacatgaaacactttagtgtagtaattgtatccactgtttgcatttcaactgccacatttgtcacatttttatggaatctgttagtggattcatctttttgttaatccatgtgtttattatatgtgactatttttgtaaacgaagtttctgttgagaaataggctaaggacctctataacaggtatgccacctggggggtatggcaaccacatggccctcccagctacacaaagtcgtggtttgcatgagggcatgctgcacttagagatcatgcatgagaaaaagtcacaagaaaaacaaattcttaaatttcaccatatttctgggaggggtaattgggtgataagtggaggtgctttgttgatcttgttttgcgaaatccagcccctagaccaagtagattatttgtgggtaggccagtaaatcttagcaggtgcaaacttcattcaaatgtttggagtcataaatgttatgtttctttttgttgtattaaaaaaaaaacctgaatagtgaatattgcccctcaccctccaccgccagaagactgaattgaccaaaattactctttataaatttctgctttttcctgcactttgtttagccatcttcggctctcagcaaggttgacactgtatatgttaatgaaatgctatttattatgtaaatagtcattttaccctgtggtgcacgtttgagcaaacaaataatgacctaagcacagtatttattgcatcaaatatgtaccacaagaaatgtagagtgcaagctttacacaggtaataaaatgtattctgtaccatttatagatagtttggatgctatcaatgcatgtttatattaccatgctgctgtatctggtttctctcactgctcagaatctcatttatgagaaaccatatgtcagtggtaaagtcaaggaaattgttcaacagatctcatttatttaagtcattaagcaatagtttgcagcactttaacagctttttggttatttttacattttaagtggataacatatggtatatagccagactgtacagacatgtttaaaaaaacacactgcttaacctattaaatatgtgtttagaattttataagcaaatataaatactgtaaaaagtcactttattttatttttcagcattatgtacataaatatgaagaggaaattatcttcaggttgatatcacaatcacttttcttactttctgtccatagtactttttcatgaaagaaatttgctaaataagacatgaaaacaagactgggtagttgtagatttctgctttttaaattacatttgctaattttagattatttcacaattttaaggagcaaaataggttcacgattcatatccaaattatgctttgcaattggaaaagggtttaaaattttatttatatttctggtagtacctgcactaactgaattgaaggtagtgcttatgttatttttgttctttttttctgacttcggtttatgttttcatttctttggagtaatgctgctctagattgttctaaatagaatgtgggcttcataatttttttttccacaaaaacagagtagtcaacttatatagtcaattacatcaggacattttgtgtttcttacagaagcaaaccataggctcctcttttccttaaaactacttagataaactgtattcgtgaactgcatgctggaaaatgctactattatgctaaataatgctaaccaacatttaaaatgtgcaaaactaataaagattacattttttattttattgtttgcccagtcactttttgttaacagaatattctaatgatatggagattttttacattacaaattgggggagaaggggagcgcgcgcgcacacacacacacacacacacacacacacacacacacacagaggcatacccacgttgacaacaaaacctagggtagatatgtcactggaggtagggggtaatgacctcccagaattacaagcagcaggtgtgttctctgttaggaggaagaactggtgtcagaggatagctagtgattctaggaggaagagaagtatggaagccagagtgatggtggatgaccccttgagctatgaaaagaaacccttaaatcatcatttaaaaatttagaattgccatgtgtgtaggatactgtgtttgctcctccagagccactctctctgcttctgcatcattctgtgtgtcccagaagggtgacttctacacattgcaaaaatgggctctcctacctttgagctcccaattggtttggccaatgagaagcaccagtgggaaagcaccagagagagaagattgacataggaatatttcttctccaattccttctttgctgggttggcactggactcattcctccccgaaaagtcatactccaatcagactgcccctcatacaactgaagctactttctctggggtcaggtaatcactcctccccttgctccttcaggtctgctgctgcattgagagtgcttttgtattccttgtagctttctcctaacattgctgacacttttgtaaatgtccccttcatgaaattcttctatatgcctcatttcagcatgccatctgtctcctgcctggctgacacaaggtgattcaacagctcatgaaagtcagcaggaagcaaagatgtgccttgcttcagcttggggtcttaatcttgctaacttttgcagataaagaaaaacagtaactgggggaaccacagtgaagtccagtgcagaattcacagatatcatggaaaggttactcgggtggtccagatagtaaaattaacagtctaaattaatctatctaaatttctgaggaacgagaagccttcccttgtcatcaggtgaagccagaagagggaatatagcctcaaccagaaaagggacagtaattaaaaggcttttcccatccttgtacaatggactgactttgcctcttcataacatcacaatcctaaagcaacacaacaattaattctgatatattagtagctgaaaaaaattcccatttccaactaaggtaggtcagaattataggataaaccctgcagactttttatactacccatccacgccattactcactgttacctttccaaatacaaagagaagaactggtaaaacataatcatataaatctccatattcattttgaaatatttggcatgatattttctgtgctaaaaagtaattattcttcaaagaatgatgaggtcatgtcagtaagacacaggaaccaactagaaggggcttcccactggccaaatctggggcaagttgagcatcaaaataaatgatagtaaaagattataattcattgaataagaatcagcaaatacatactgatgtaagtaaataaggaaaagtacaaatctgtttcttgcagttgaatgttaattaacaattgtagaagaaataacggagttagaaaaatcactatttggcaatcaccctaatgacaattgattcatacaagaatcatcaatgagtattaaaactcatgggtgaaagtttgatgaggaatagggtatttatagcatcttaaagtatctcttctctattaagtagaaaatttaaacagaagaaagtatactttggagaaatacagcagacaataccttcaaagatatcatcaattatgagaccaactgatactatgtgcctcctgataagatatactgaaagggccacattacttcttggtacacagtcaaaattttaaaaccagaatctaactacaaggaaaatcaaattgaggacactctataaaataagtggactgaactccttaaaaatgtcaatgtcatgaaagacaaagaaaggctaaagaattccatgaggtcaaagaactatgacaactaaacacaattctggatggaatatcaaattaaaaaataacagataaataatattattgggaaagttgaataaatttgaatatggactgtttattagttattagtattataatagtgttaattttcctaattttgttaagactagtgtgcctgttccatgaaaatagaaaatgttcttattctctgaaaatgcatgctaaagtatttaggggtgaatgcaacaatgtctgcagctcattcttgaatcagttcaaagaaaaatgagttacatttatatatatatgtatgtatgtaaacagacatagataaaagtatagatgtgtgtgtgtctttagaaaggggaggattttttttttttttttgctgtgtgttactgaagtgcctatgtctgcgtgttcacactatcatattttgtatgccctggactttataatttctaccttcaaaattagatctactgttggtaattaattcaatatatactggttttttaactactattctcatttcctagcagtaatcttcctgaaaagtcacagaaatgattacattccttgttcttcataataatcactgtttaattaaaataagaatattttagaaaagatctgcggcatagtggttaagaccccagtatttgatgctaaacagatctgatttggataacagaaggtggcactttgctgtttaagctggggaccagacactgtgggtataaatagtaattccaaacacagctccacagagcagcacccttatgacaaggttttcatatgtctatagttaagccagaaaattaagaataatgccataaatatttataaagctgaacatatccaagttaaagacctttatcctgaaattgtatcttttagattattttctaaagactaataccatttaatgtttaaatgttctttggaaatgatggtgagaatacgtgataatgggtcattggttttaatattttatttagccaagtggaaaattggcaacctggtgtcggtcctcccatttgtattttactggtgcatgaaatccaaaagtctagtaaccattgggacagacaactctactgcataagtttgtatgtttgtatatctgtatcacaaagcccagacactcgaactatataaacttgtcgcactaaagacagcaaatatgtctggtaattgcatattcttcatgtgtgcactggaatttcttattatataagaaaataaatgtgtttctaaaccaccatgaattgggtactgctgatagtactattcttcctggcacatggaaatatcccactgaggttgtcaatcaatattgatttaatcagtgtggcagcaaaggcactagaggaggaaaatactctagacaatcaagtatagatgggaaaattgcatcaccaagaaattcttaaaatcacaagtggataatttgcaatatcaattgattttactcaactgcttgagtcctttatcattccgttagaacactcctcatatttgcagataactcagcccctcacctcagcaacaagcaagaggacatcattataaacttcctcaatttctttcctatccagtgaaaaatatctaagtcccttttcccttcccttttccttcccttcccttcctttttctttccttccattctcttcctttttccttcctttttctttccttccattctcttcctttttccttcctttttcttactttacctccccctcctacctttccctttctcccttcctccctctctcccttccttcctctctccctctccttccttccttccttcaatccatacttttatatcttttcagagatcaatttttcccattcatttctacattctcagataccttgctccatgacttgttctacttctcttctatctttattctttccctcttgactgatcctttttgtctgcctttgcattttcaaaatcagtttttctaatcttaaaaaataactttgctcaaccctgatgcatctttattcactgtgtcattatctcattatttttaaaggttagtttctaaagccagggctctatactcactaccttcactcttggttaaaattaaaagaaatataggtcccagtgatatttatgggaaaatttgactgtgaataatcttgttgatataaacactttgggttttcaaaatgttatgctagctgttaactttcccagtaacattatgagggaagggctggaaaatacaaaaggtagacataggaaccgagaacaccacccctatggagccaagctatacatactctgtctctggttatcataaatacatctcctatattcaatgcttgcttagaaaggcatgatgtccacggagcaattcaattgttcactgtgatgggtttttttgttttctcctcatggaatgcaacttttatttat

SEQ ID NO: 554 - DNA, 12933 bp, Homo sapiens
  source 1..12933: mol_type = genomic DNA
accatagagtgaggcgaggatgaagccgagaggatactgcagaggtctctggtgcatgtgtgtatgtgtgcgtttgtgtgtgtttgtgtgtctgtgtgttctgccccagtgagactgcagcccttgtaaatactttgacaccttttgcaagaaggaatctgaacaattgcaactgaaggcacattgttatcatctcgtctttgggtgatgctgttcctcactgcagatggataattttccttttaatcaggaatttcatatgcagaataaatggtaattaaaatgtgcaggatgacaagatggagcaaacagtgcttgtaccaccaggacctgacagcttcaacttcttcaccagagaatctcttgcggctattgaaagacgcattgcagaagaaaaggcaaagaatcccaaaccagacaaaaaagatgacgacgaaaatggcccaaagccaaatagtgacttggaagctggaaagaaccttccatttatttatggagacattcctccagagatggtgtcagagcccctggaggacctggacccctactatatcaataagaaaacttttatagtattgaataaagggaaggccatcttccggttcagtgccacctctgccctgtacattttaactcccttcaatcctcttaggaaaatagctattaagattttggtacattcattattcagcatgctaattatgtgcactattttgacaaactgtgtgtttatgacaatgagtaaccctcctgattggacaaagaatgtagaatacaccttcacaggaatatatacttttgaatcacttataaaaattattgcaaggggattctgtttagaagattttactttccttcgggatccatggaactggctcgatttcactgtcattacatttgcgtacgtcacagagtttgtggacctgggcaatgtctcggcattgagaacattcagagttctccgagcattgaagacgatttcagtcattccaggcctgaaaaccattgtgggagccctgatccagtctgtgaagaagctctcagatgtaatgatcctgactgtgttctgtctgagcgtatttgctctaattgggctgcagctgttcatgggcaacctgaggaataaatgtatacaatggcctcccaccaatgcttccttggaggaacatagtatagaaaagaatataactgtgaattataatggtacacttataaatgaaactgtctttgagtttgactggaagtcatatattcaagattcaagatatcattatttcctggagggttttttagatgcactactatgtggaaatagctctgatgcaggccaatgtccagagggatatatgtgtgtgaaagctggtagaaatcccaattatggctacacaagctttgataccttcagttgggcttttttgtccttgtttcgactaatgactcaggacttctgggaaaatctttatcaactgacattacgtgctgctgggaaaacgtacatgatattttttgtattggtcattttcttgggctcattctacctaataaatttgatcctggctgtggtggccatggcctacgaggaacagaatcaggccaccttggaagaagcagaacagaaagaggccgaatttcagcagatgattgaacagcttaaaaagcaacaggaggcagctcagcaggcagcaacggcaactgcctcagaacattccagagagcccagtgcagcaggcaggctctcagacagctcatctgaagcctctaagttgagttccaagagtgctaaggaaagaagaaatcggaggaagaaaagaaaacagaaagagcagtctggtggggaagagaaagatgaggatgaattccaaaaatctgaatctgaggacagcatcaggaggaaaggttttcgcttctccattgaagggaaccgattgacatatgaaaagaggtactcctccccacaccagtctttgttgagcatccgtggctccctattttcaccaaggcgaaatagcagaacaagccttttcagctttagagggcgagcaaaggatgtgggatctgagaacgacttcgcagatgatgagcacagcacctttgaggataacgagagccgtagagattccttgtttgtgccccgacgacacggagagagacgcaacagcaacctgagtcagaccagtaggtcatcccggatgctggcagtgtttccagcgaatgggaagatgcacagcactgtggattgcaatggtgtggtttccttggttggtggaccttcagttcctacatcgcctgttggacagcttctgccagaggtgataatagataagccagctactgatgacaatggaacaaccactgaaactgaaatgagaaagagaaggtcaagttctttccacgtttccatggactttctagaagatccttcccaaaggcaacgagcaatgagtatagccagcattctaacaaatacagtagaagaacttgaagaatccaggcagaaatgcccaccctgttggtataaattttccaacatattcttaatctgggactgttctccatattggttaaaagtgaaacatgttgtcaacctggttgtgatggacccatttgttgacctggccatcaccatctgtattgtcttaaatactcttttcatggccatggagcactatccaatgacggaccatttcaataatgtgcttacagtaggaaacttggttttcactgggatctttacagcagaaatgtttctgaaaattattgccatggatccttactattatttccaagaaggctggaatatctttgacggttttattgtgacgcttagcctggtagaacttggactcgccaatgtggaaggattatctgttctccgttcatttcgattgctgcgagttttcaagttggcaaaatcttggccaacgttaaatatgctaataaagatcatcggcaattccgtgggggctctgggaaatttaaccctcgtcttggccatcatcgtcttcatttttgccgtggtcggcatgcagctctttggtaaaagctacaaagattgtgtctgcaagatcgccagtgattgtcaactcccacgctggcacatgaatgacttcttccactccttcctgattgtgttccgcgtgctgtgtggggagtggatagagaccatgtgggactgtatggaggttgctggtcaagccatgtgccttactgtcttcatgatggtcatggtgattggaaacctagtggtcctgaatctctttctggccttgcttctgagctcatttagtgcagacaaccttgcagccactgatgatgataatgaaatgaataatctccaaattgctgtggataggatgcacaaaggagtagcttatgtgaaaagaaaaatatatgaatttattcaacagtccttcattaggaaacaaaagattttagatgaaattaaaccacttgatgatctaaacaacaagaaagacagttgtatgtccaatcatacagcagaaattgggaaagatcttgactatcttaaagatgtaaatggaactacaagtggtataggaactggcagcagtgttgaaaaatacattattgatgaaagtgattacatgtcattcataaacaaccccagtcttactgtgactgtaccaattgctgtaggagaatctgactttgaaaatttaaacacggaagactttagtagtgaatcggatctggaagaaagcaaagagaaactgaatgaaagcagtagctcatcagaaggtagcactgtggacatcggcgcacctgtagaagaacagcccgtagtggaacctgaagaaactcttgaaccagaagcttgtttcactgaaggctgtgtacaaagattcaagtgttgtcaaatcaatgtggaagaaggcagaggaaaacaatggtggaacctgagaaggacgtgtttccgaatagttgaacataactggtttgagaccttcattgttttcatgattctccttagtagtggtgctctggcatttgaagatatatatattgatcagcgaaagacgattaagacgatgttggaatatgctgacaaggttttcacttacattttcattctggaaatgcttctaaaatgggtggcatatggctatcaaacatatttcaccaatgcctggtgttggctggacttcttaattgttgatgtttcattggtcagtttaacagcaaatgccttgggttactcagaacttggagccatcaaatctctcaggacactaagagctctgagacctctaagagccttatctcgatttgaagggatgagggtggttgtgaatgcccttttaggagcaattccatccatcatgaatgtgcttctggtttgtcttatattctggctaattttcagcatcatgggcgtaaatttgtttgctggcaaattctaccactgtattaacaccacaactggtgacaggtttgacatcgaagacgtgaataatcatactgattgcctaaaactaatagaaagaaatgagactgctcgatggaaaaatgtgaaagtaaactttgataatgtaggatttgggtatctctctttgcttcaagttgccacattcaaaggatggatggatataatgtatgcagcagttgattccagaaatgtggaactccagcctaagtatgaagaaagtctgtacatgtatctttactttgttattttcatcatctttgggtccttcttcaccttgaacctgtttattggtgtcatcatagataatttcaaccagcagaaaaagaagtttggaggtcaagacatctttatgacagaagaacagaagaaatactataatgcaatgaaaaaattaggatcgaaaaaaccgcaaaagcctatacctcgaccaggaaacaaatttcaaggaatggtctttgacttcgtaaccagacaagtttttgacataagcatcatgattctcatctgtcttaacatggtcacaatgatggtggaaacagatgaccagagtgaatatgtgactaccattttgtcacgcatcaatctggtgttcattgtgctatttactggagagtgtgtactgaaactcatctctctacgccattattattttaccattggatggaatatttttgattttgtggttgtcattctctccattgtaggtatgtttcttgccgagctgatagaaaagtatttcgtgtcccctaccctgttccgagtgatccgtcttgctaggattggccgaatcctacgtctgatcaaaggagcaaaggggatccgcacgctgctctttgctttgatgatgtcccttcctgcgttgtttaacatcggcctcctactcttcctagtcatgttcatctacgccatctttgggatgtccaactttgcctatgttaagagggaagttgggatcgatgacatgttcaactttgagacctttggcaacagcatgatctgcctattccaaattacaacctctgctggctgggatggattgctagcacccattctcaacagtaagccacccgactgtgaccctaataaagttaaccctggaagctcagttaagggagactgtgggaacccatctgttggaattttcttttttgtcagttacatcatcatatccttcctggttgtggtgaacatgtacatcgcggtcatcctggagaacttcagtgttgctactgaagaaagtgcagagcctctgagtgaggatgactttgagatgttctatgaggtttgggagaagtttgatcccgatgcaactcagttcatggaatttgaaaaattatctcagtttgcagctgcgcttgaaccgcctctcaatctgccacaaccaaacaaactccagctcattgccatggatttgcccatggtgagtggtgaccggatccactgtcttgatatcttatttgcttttacaaagcgggttctaggagagagtggagagatggatgctctacgaatacagatggaagagcgattcatggcttccaatccttccaaggtctcctatcagccaatcactactactttaaaacgaaaacaagaggaagtatctgctgtcattattcagcgtgcttacagacgccaccttttaaagcgaactgtaaaacaagcttcctttacgtacaataaaaacaaaatcaaaggtggggctaatcttcttataaaagaagacatgataattgacagaataaatgaaaactctattacagaaaaaactgatctgaccatgtccactgcagcttgtccaccttcctatgaccgggtgacaaagccaattgtggaaaaacatgagcaagaaggcaaagatgaaaaagccaaagggaaataaatgaaaataaataaaaataattgggtgacaaattgtttacagcctgtgaaggtgatgtatttttatcaacaggactcctttaggaggtcaatgccaaactgactgtttttacacaaatctccttaaggtcagtgcctacaataagacagtgaccccttgtcagcaaactgtgactctgtgtaaaggggagatgaccttgacaggaggttactgttctcactaccagctgacactgctgaagataagatgcacaatggctagtcagactgtagggaccagtttcaaggggtgcaaacctgtgattttggggttgtttaacatgaaacactttagtgtagtaattgtatccactgtttgcatttcaactgccacatttgtcacatttttatggaatctgttagtggattcatctttttgttaatccatgtgtttattatatgtgactatttttgtaaacgaagtttctgttgagaaataggctaaggacctctataacaggtatgccacctggggggtatggcaaccacatggccctcccagctacacaaagtcgtggtttgcatgagggcatgctgcacttagagatcatgcatgagaaaaagtcacaagaaaaacaaattcttaaatttcaccatatttctgggaggggtaattgggtgataagtggaggtgctttgttgatcttgttttgcgaaatccagcccctagaccaagtagattatttgtgggtaggccagtaaatcttagcaggtgcaaacttcattcaaatgtttggagtcataaatgttatgtttctttttgttgtattaaaaaaaaaacctgaatagtgaatattgcccctcaccctccaccgccagaagactgaattgaccaaaattactctttataaatttctgctttttcctgcactttgtttagccatcttcggctctcagcaaggttgacactgtatatgttaatgaaatgctatttattatgtaaatagtcattttaccctgtggtgcacgtttgagcaaacaaataatgacctaagcacagtatttattgcatcaaatatgtaccacaagaaatgtagagtgcaagctttacacaggtaataaaatgtattctgtaccatttatagatagtttggatgctatcaatgcatgtttatattaccatgctgctgtatctggtttctctcactgctcagaatctcatttatgagaaaccatatgtcagtggtaaagtcaaggaaattgttcaacagatctcatttatttaagtcattaagcaatagtttgcagcactttaacagctttttggttatttttacattttaagtggataacatatggtatatagccagactgtacagacatgtttaaaaaaacacactgcttaacctattaaatatgtgtttagaattttataagcaaatataaatactgtaaaaagtcactttattttatttttcagcattatgtacataaatatgaagaggaaattatcttcaggttgatatcacaatcacttttcttactttctgtccatagtactttttcatgaaagaaatttgctaaataagacatgaaaacaagactgggtagttgtagatttctgctttttaaattacatttgctaattttagattatttcacaattttaaggagcaaaataggttcacgattcatatccaaattatgctttgcaattggaaaagggtttaaaattttatttatatttctggtagtacctgcactaactgaattgaaggtagtgcttatgttatttttgttctttttttctgacttcggtttatgttttcatttctttggagtaatgctgctctagattgttctaaatagaatgtgggcttcataatttttttttccacaaaaacagagtagtcaacttatatagtcaattacatcaggacattttgtgtttcttacagaagcaaaccataggctcctcttttccttaaaactacttagataaactgtattcgtgaactgcatgctggaaaatgctactattatgctaaataatgctaaccaacatttaaaatgtgcaaaactaataaagattacattttttattttattgtttgcccagtcactttttgttaacagaatattctaatgatatggagattttttacattacaaattgggggagaaggggagcgcgcgcgcacacacacacacacacacacacacacacacacacacacagaggcatacccacgttgacaacaaaacctagggtagatatgtcactggaggtagggggtaatgacctcccagaattacaagcagcaggtgtgttctctgttaggaggaagaactggtgtcagaggatagctagtgattctaggaggaagagaagtatggaagccagagtgatggtggatgaccccttgagctatgaaaagaaacccttaaatcatcatttaaaaatttagaattgccatgtgtgtaggatactgtgtttgctcctccagagccactctctctgcttctgcatcattctgtgtgtcccagaagggtgacttctacacattgcaaaaatgggctctcctacctttgagctcccaattggtttggccaatgagaagcaccagtgggaaagcaccagagagagaagattgacataggaatatttcttctccaattccttctttgctgggttggcactggactcattcctccccgaaaagtcatactccaatcagactgcccctcatacaactgaagctactttctctggggtcaggtaatcactcctccccttgctccttcaggtctgctgctgcattgagagtgcttttgtattccttgtagctttctcctaacattgctgacacttttgtaaatgtccccttcatgaaattcttctatatgcctcatttcagcatgccatctgtctcctgcctggctgacacaaggtgattcaacagctcatgaaagtcagcaggaagcaaagatgtgccttgcttcagcttggggtcttaatcttgctaacttttgcagataaagaaaaacagtaactgggggaaccacagtgaagtccagtgcagaattcacagatatcatggaaaggttactcgggtggtccagatagtaaaattaacagtctaaattaatctatctaaatttctgaggaacgagaagccttcccttgtcatcaggtgaagccagaagagggaatatagcctcaaccagaaaagggacagtaattaaaaggcttttcccatccttgtacaatggactgactttgcctcttcataacatcacaatcctaaagcaacacaacaattaattctgatatattagtagctgaaaaaaattcccatttccaactaaggtaggtcagaattataggataaaccctgcagactttttatactacccatccacgccattactcactgttacctttccaaatacaaagagaagaactggtaaaacataatcatataaatctccatattcattttgaaatatttggcatgatattttctgtgctaaaaagtaattattcttcaaagaatgatgaggtcatgtcagtaagacacaggaaccaactagaaggggcttcccactggccaaatctggggcaagttgagcatcaaaataaatgatagtaaaagattataattcattgaataagaatcagcaaatacatactgatgtaagtaaataaggaaaagtacaaatctgtttcttgcagttgaatgttaattaacaattgtagaagaaataacggagttagaaaaatcactatttggcaatcaccctaatgacaattgattcatacaagaatcatcaatgagtattaaaactcatgggtgaaagtttgatgaggaatagggtatttatagcatcttaaagtatctcttctctattaagtagaaaatttaaacagaagaaagtatactttggagaaatacagcagacaataccttcaaagatatcatcaattatgagaccaactgatactatgtgcctcctgataagatatactgaaagggccacattacttcttggtacacagtcaaaattttaaaaccagaatctaactacaaggaaaatcaaattgaggacactctataaaataagtggactgaactccttaaaaatgtcaatgtcatgaaagacaaagaaaggctaaagaattccatgaggtcaaagaactatgacaactaaacacaattctggatggaatatcaaattaaaaaataacagataaataatattattgggaaagttgaataaatttgaatatggactgtttattagttattagtattataatagtgttaattttcctaattttgttaagactagtgtgcctgttccatgaaaatagaaaatgttcttattctctgaaaatgcatgctaaagtatttaggggtgaatgcaacaatgtctgcagctcattcttgaatcagttcaaagaaaaatgagttacatttatatatatatgtatgtatgtaaacagacatagataaaagtatagatgtgtgtgtgtctttagaaaggggaggattttttttttttttttgctgtgtgttactgaagtgcctatgtctgcgtgttcacactatcatattttgtatgccctggactttataatttctaccttcaaaattagatctactgttggtaattaattcaatatatactggttttttaactactattctcatttcctagcagtaatcttcctgaaaagtcacagaaatgattacattccttgttcttcataataatcactgtttaattaaaataagaatattttagaaaagatctgcggcatagtggttaagaccccagtatttgatgctaaacagatctgatttggataacagaaggtggcactttgctgtttaagctggggaccagacactgtgggtataaatagtaattccaaacacagctccacagagcagcacccttatgacaaggttttcatatgtctatagttaagccagaaaattaagaataatgccataaatatttataaagctgaacatatccaagttaaagacctttatcctgaaattgtatcttttagattattttctaaagactaataccatttaatgtttaaatgttctttggaaatgatggtgagaatacgtgataatgggtcattggttttaatattttatttagccaagtggaaaattggcaacctggtgtcggtcctcccatttgtattttactggtgcatgaaatccaaaagtctagtaaccattgggacagacaactctactgcataagtttgtatgtttgtatatctgtatcacaaagcccagacactcgaactatataaacttgtcgcactaaagacagcaaatatgtctggtaattgcatattcttcatgtgtgcactggaatttcttattatataagaaaataaatgtgtttctaaaccaccatgaattgggtactgctgatagtactattcttcctggcacatggaaatatcccactgaggttgtcaatcaatattgatttaatcagtgtggcagcaaaggcactagaggaggaaaatactctagacaatcaagtatagatgggaaaattgcatcaccaagaaattcttaaaatcacaagtggataatttgcaatatcaattgattttactcaactgcttgagtcctttatcattccgttagaacactcctcatatttgcagataactcagcccctcacctcagcaacaagcaagaggacatcattataaacttcctcaatttctttcctatccagtgaaaaatatctaagtcccttttcccttcccttttccttcccttcccttcctttttctttccttccattctcttcctttttccttcctttttctttccttccattctcttcctttttccttcctttttcttactttacctccccctcctacctttccctttctcccttcctccctctctcccttccttcctctctccctctccttccttccttccttcaatccatacttttatatcttttcagagatcaatttttcccattcatttctacattctcagataccttgctccatgacttgttctacttctcttctatctttattctttccctcttgactgatcctttttgtctgcctttgcattttcaaaatcagtttttctaatcttaaaaaataactttgctcaaccctgatgcatctttattcactgtgtcattatctcattatttttaaaggttagtttctaaagccagggctctatactcactaccttcactcttggttaaaattaaaagaaatataggtcccagtgatatttatgggaaaatttgactgtgaataatcttgttgatataaacactttgggttttcaaaatgttatgctagctgttaactttcccagtaacattatgagggaagggctggaaaatacaaaaggtagacataggaaccgagaacaccacccctatggagccaagctatacatactctgtctctggttatcataaatacatctcctatattcaatgcttgcttagaaaggcatgatgtccacggagcaattcaattgttcactgtgatgggtttttttgttttctcctcatggaatgcaacttttatttat

SEQ ID NO: 555 - DNA, 12938 bp, Homo sapiens
  source 1..12938: mol_type = genomic DNA
accatagagtgaggcgaggatgaagccgagaggatactgcagaggtctctggtgcatgtgtgtatgtgtgcgtttgtgtgtgtttgtgtgtctgtgtgttctgccccagtgagactgcagcccttgtaaatactttgacaccttttgcaagaaggaatctgaacaattgcaactgaaggcacattgttatcatctcgtctttgggtgatgctgttcctcactgcagatggataattttccttttaatcaggtttgggcaattatgaataaggctgctgtatacatccgtgtgcaggattttgtgtggacataagttttcaactcctttggttaaatcctaaggaatttcatatgcagaataaatggtaattaaaatgtgcaggatgacaagatggagcaaacagtgcttgtaccaccaggacctgacagcttcaacttcttcaccagagaatctcttgcggctattgaaagacgcattgcagaagaaaaggcaaagaatcccaaaccagacaaaaaagatgacgacgaaaatggcccaaagccaaatagtgacttggaagctggaaagaaccttccatttatttatggagacattcctccagagatggtgtcagagcccctggaggacctggacccctactatatcaataagaaaacttttatagtattgaataaagggaaggccatcttccggttcagtgccacctctgccctgtacattttaactcccttcaatcctcttaggaaaatagctattaagattttggtacattcattattcagcatgctaattatgtgcactattttgacaaactgtgtgtttatgacaatgagtaaccctcctgattggacaaagaatgtagaatacaccttcacaggaatatatacttttgaatcacttataaaaattattgcaaggggattctgtttagaagattttactttccttcgggatccatggaactggctcgatttcactgtcattacatttgcgtacgtcacagagtttgtggacctgggcaatgtctcggcattgagaacattcagagttctccgagcattgaagacgatttcagtcattccaggcctgaaaaccattgtgggagccctgatccagtctgtgaagaagctctcagatgtaatgatcctgactgtgttctgtctgagcgtatttgctctaattgggctgcagctgttcatgggcaacctgaggaataaatgtatacaatggcctcccaccaatgcttccttggaggaacatagtatagaaaagaatataactgtgaattataatggtacacttataaatgaaactgtctttgagtttgactggaagtcatatattcaagattcaagatatcattatttcctggagggttttttagatgcactactatgtggaaatagctctgatgcaggccaatgtccagagggatatatgtgtgtgaaagctggtagaaatcccaattatggctacacaagctttgataccttcagttgggcttttttgtccttgtttcgactaatgactcaggacttctgggaaaatctttatcaactgacattacgtgctgctgggaaaacgtacatgatattttttgtattggtcattttcttgggctcattctacctaataaatttgatcctggctgtggtggccatggcctacgaggaacagaatcaggccaccttggaagaagcagaacagaaagaggccgaatttcagcagatgattgaacagcttaaaaagcaacaggaggcagctcaggcagcaacggcaactgcctcagaacattccagagagcccagtgcagcaggcaggctctcagacagctcatctgaagcctctaagttgagttccaagagtgctaaggaaagaagaaatcggaggaagaaaagaaaacagaaagagcagtctggtggggaagagaaagatgaggatgaattccaaaaatctgaatctgaggacagcatcaggaggaaaggttttcgcttctccattgaagggaaccgattgacatatgaaaagaggtactcctccccacaccagtctttgttgagcatccgtggctccctattttcaccaaggcgaaatagcagaacaagccttttcagctttagagggcgagcaaaggatgtgggatctgagaacgacttcgcagatgatgagcacagcacctttgaggataacgagagccgtagagattccttgtttgtgccccgacgacacggagagagacgcaacagcaacctgagtcagaccagtaggtcatcccggatgctggcagtgtttccagcgaatgggaagatgcacagcactgtggattgcaatggtgtggtttccttgggaacaaccactgaaactgaaatgagaaagagaaggtcaagttctttccacgtttccatggactttctagaagatccttcccaaaggcaacgagcaatgagtatagccagcattctaacaaatacagtagaagaacttgaagaatccaggcagaaatgcccaccctgttggtataaattttccaacatattcttaatctgggactgttctccatattggttaaaagtgaaacatgttgtcaacctggttgtgatggacccatttgttgacctggccatcaccatctgtattgtcttaaatactcttttcatggccatggagcactatccaatgacggaccatttcaataatgtgcttacagtaggaaacttggttttcactgggatctttacagcagaaatgtttctgaaaattattgccatggatccttactattatttccaagaaggctggaatatctttgacggttttattgtgacgcttagcctggtagaacttggactcgccaatgtggaaggattatctgttctccgttcatttcgattgctgcgagttttcaagttggcaaaatcttggccaacgttaaatatgctaataaagatcatcggcaattccgtgggggctctgggaaatttaaccctcgtcttggccatcatcgtcttcatttttgccgtggtcggcatgcagctctttggtaaaagctacaaagattgtgtctgcaagatcgccagtgattgtcaactcccacgctggcacatgaatgacttcttccactccttcctgattgtgttccgcgtgctgtgtggggagtggatagagaccatgtgggactgtatggaggttgctggtcaagccatgtgccttactgtcttcatgatggtcatggtgattggaaacctagtggtcctgaatctctttctggccttgcttctgagctcatttagtgcagacaaccttgcagccactgatgatgataatgaaatgaataatctccaaattgctgtggataggatgcacaaaggagtagcttatgtgaaaagaaaaatatatgaatttattcaacagtccttcattaggaaacaaaagattttagatgaaattaaaccacttgatgatctaaacaacaagaaagacagttgtatgtccaatcatacagcagaaattgggaaagatcttgactatcttaaagatgtaaatggaactacaagtggtataggaactggcagcagtgttgaaaaatacattattgatgaaagtgattacatgtcattcataaacaaccccagtcttactgtgactgtaccaattgctgtaggagaatctgactttgaaaatttaaacacggaagactttagtagtgaatcggatctggaagaaagcaaagagaaactgaatgaaagcagtagctcatcagaaggtagcactgtggacatcggcgcacctgtagaagaacagcccgtagtggaacctgaagaaactcttgaaccagaagcttgtttcactgaaggctgtgtacaaagattcaagtgttgtcaaatcaatgtggaagaaggcagaggaaaacaatggtggaacctgagaaggacgtgtttccgaatagttgaacataactggtttgagaccttcattgttttcatgattctccttagtagtggtgctctggcatttgaagatatatatattgatcagcgaaagacgattaagacgatgttggaatatgctgacaaggttttcacttacattttcattctggaaatgcttctaaaatgggtggcatatggctatcaaacatatttcaccaatgcctggtgttggctggacttcttaattgttgatgtttcattggtcagtttaacagcaaatgccttgggttactcagaacttggagccatcaaatctctcaggacactaagagctctgagacctctaagagccttatctcgatttgaagggatgagggtggttgtgaatgcccttttaggagcaattccatccatcatgaatgtgcttctggtttgtcttatattctggctaattttcagcatcatgggcgtaaatttgtttgctggcaaattctaccactgtattaacaccacaactggtgacaggtttgacatcgaagacgtgaataatcatactgattgcctaaaactaatagaaagaaatgagactgctcgatggaaaaatgtgaaagtaaactttgataatgtaggatttgggtatctctctttgcttcaagttgccacattcaaaggatggatggatataatgtatgcagcagttgattccagaaatgtggaactccagcctaagtatgaagaaagtctgtacatgtatctttactttgttattttcatcatctttgggtccttcttcaccttgaacctgtttattggtgtcatcatagataatttcaaccagcagaaaaagaagtttggaggtcaagacatctttatgacagaagaacagaagaaatactataatgcaatgaaaaaattaggatcgaaaaaaccgcaaaagcctatacctcgaccaggaaacaaatttcaaggaatggtctttgacttcgtaaccagacaagtttttgacataagcatcatgattctcatctgtcttaacatggtcacaatgatggtggaaacagatgaccagagtgaatatgtgactaccattttgtcacgcatcaatctggtgttcattgtgctatttactggagagtgtgtactgaaactcatctctctacgccattattattttaccattggatggaatatttttgattttgtggttgtcattctctccattgtaggtatgtttcttgccgagctgatagaaaagtatttcgtgtcccctaccctgttccgagtgatccgtcttgctaggattggccgaatcctacgtctgatcaaaggagcaaaggggatccgcacgctgctctttgctttgatgatgtcccttcctgcgttgtttaacatcggcctcctactcttcctagtcatgttcatctacgccatctttgggatgtccaactttgcctatgttaagagggaagttgggatcgatgacatgttcaactttgagacctttggcaacagcatgatctgcctattccaaattacaacctctgctggctgggatggattgctagcacccattctcaacagtaagccacccgactgtgaccctaataaagttaaccctggaagctcagttaagggagactgtgggaacccatctgttggaattttcttttttgtcagttacatcatcatatccttcctggttgtggtgaacatgtacatcgcggtcatcctggagaacttcagtgttgctactgaagaaagtgcagagcctctgagtgaggatgactttgagatgttctatgaggtttgggagaagtttgatcccgatgcaactcagttcatggaatttgaaaaattatctcagtttgcagctgcgcttgaaccgcctctcaatctgccacaaccaaacaaactccagctcattgccatggatttgcccatggtgagtggtgaccggatccactgtcttgatatcttatttgcttttacaaagcgggttctaggagagagtggagagatggatgctctacgaatacagatggaagagcgattcatggcttccaatccttccaaggtctcctatcagccaatcactactactttaaaacgaaaacaagaggaagtatctgctgtcattattcagcgtgcttacagacgccaccttttaaagcgaactgtaaaacaagcttcctttacgtacaataaaaacaaaatcaaaggtggggctaatcttcttataaaagaagacatgataattgacagaataaatgaaaactctattacagaaaaaactgatctgaccatgtccactgcagcttgtccaccttcctatgaccgggtgacaaagccaattgtggaaaaacatgagcaagaaggcaaagatgaaaaagccaaagggaaataaatgaaaataaataaaaataattgggtgacaaattgtttacagcctgtgaaggtgatgtatttttatcaacaggactcctttaggaggtcaatgccaaactgactgtttttacacaaatctccttaaggtcagtgcctacaataagacagtgaccccttgtcagcaaactgtgactctgtgtaaaggggagatgaccttgacaggaggttactgttctcactaccagctgacactgctgaagataagatgcacaatggctagtcagactgtagggaccagtttcaaggggtgcaaacctgtgattttggggttgtttaacatgaaacactttagtgtagtaattgtatccactgtttgcatttcaactgccacatttgtcacatttttatggaatctgttagtggattcatctttttgttaatccatgtgtttattatatgtgactatttttgtaaacgaagtttctgttgagaaataggctaaggacctctataacaggtatgccacctggggggtatggcaaccacatggccctcccagctacacaaagtcgtggtttgcatgagggcatgctgcacttagagatcatgcatgagaaaaagtcacaagaaaaacaaattcttaaatttcaccatatttctgggaggggtaattgggtgataagtggaggtgctttgttgatcttgttttgcgaaatccagcccctagaccaagtagattatttgtgggtaggccagtaaatcttagcaggtgcaaacttcattcaaatgtttggagtcataaatgttatgtttctttttgttgtattaaaaaaaaaacctgaatagtgaatattgcccctcaccctccaccgccagaagactgaattgaccaaaattactctttataaatttctgctttttcctgcactttgtttagccatcttcggctctcagcaaggttgacactgtatatgttaatgaaatgctatttattatgtaaatagtcattttaccctgtggtgcacgtttgagcaaacaaataatgacctaagcacagtatttattgcatcaaatatgtaccacaagaaatgtagagtgcaagctttacacaggtaataaaatgtattctgtaccatttatagatagtttggatgctatcaatgcatgtttatattaccatgctgctgtatctggtttctctcactgctcagaatctcatttatgagaaaccatatgtcagtggtaaagtcaaggaaattgttcaacagatctcatttatttaagtcattaagcaatagtttgcagcactttaacagctttttggttatttttacattttaagtggataacatatggtatatagccagactgtacagacatgtttaaaaaaacacactgcttaacctattaaatatgtgtttagaattttataagcaaatataaatactgtaaaaagtcactttattttatttttcagcattatgtacataaatatgaagaggaaattatcttcaggttgatatcacaatcacttttcttactttctgtccatagtactttttcatgaaagaaatttgctaaataagacatgaaaacaagactgggtagttgtagatttctgctttttaaattacatttgctaattttagattatttcacaattttaaggagcaaaataggttcacgattcatatccaaattatgctttgcaattggaaaagggtttaaaattttatttatatttctggtagtacctgcactaactgaattgaaggtagtgcttatgttatttttgttctttttttctgacttcggtttatgttttcatttctttggagtaatgctgctctagattgttctaaatagaatgtgggcttcataatttttttttccacaaaaacagagtagtcaacttatatagtcaattacatcaggacattttgtgtttcttacagaagcaaaccataggctcctcttttccttaaaactacttagataaactgtattcgtgaactgcatgctggaaaatgctactattatgctaaataatgctaaccaacatttaaaatgtgcaaaactaataaagattacattttttattttattgtttgcccagtcactttttgttaacagaatattctaatgatatggagattttttacattacaaattgggggagaaggggagcgcgcgcgcacacacacacacacacacacacacacacacacacacacagaggcatacccacgttgacaacaaaacctagggtagatatgtcactggaggtagggggtaatgacctcccagaattacaagcagcaggtgtgttctctgttaggaggaagaactggtgtcagaggatagctagtgattctaggaggaagagaagtatggaagccagagtgatggtggatgaccccttgagctatgaaaagaaacccttaaatcatcatttaaaaatttagaattgccatgtgtgtaggatactgtgtttgctcctccagagccactctctctgcttctgcatcattctgtgtgtcccagaagggtgacttctacacattgcaaaaatgggctctcctacctttgagctcccaattggtttggccaatgagaagcaccagtgggaaagcaccagagagagaagattgacataggaatatttcttctccaattccttctttgctgggttggcactggactcattcctccccgaaaagtcatactccaatcagactgcccctcatacaactgaagctactttctctggggtcaggtaatcactcctccccttgctccttcaggtctgctgctgcattgagagtgcttttgtattccttgtagctttctcctaacattgctgacacttttgtaaatgtccccttcatgaaattcttctatatgcctcatttcagcatgccatctgtctcctgcctggctgacacaaggtgattcaacagctcatgaaagtcagcaggaagcaaagatgtgccttgcttcagcttggggtcttaatcttgctaacttttgcagataaagaaaaacagtaactgggggaaccacagtgaagtccagtgcagaattcacagatatcatggaaaggttactcgggtggtccagatagtaaaattaacagtctaaattaatctatctaaatttctgaggaacgagaagccttcccttgtcatcaggtgaagccagaagagggaatatagcctcaaccagaaaagggacagtaattaaaaggcttttcccatccttgtacaatggactgactttgcctcttcataacatcacaatcctaaagcaacacaacaattaattctgatatattagtagctgaaaaaaattcccatttccaactaaggtaggtcagaattataggataaaccctgcagactttttatactacccatccacgccattactcactgttacctttccaaatacaaagagaagaactggtaaaacataatcatataaatctccatattcattttgaaatatttggcatgatattttctgtgctaaaaagtaattattcttcaaagaatgatgaggtcatgtcagtaagacacaggaaccaactagaaggggcttcccactggccaaatctggggcaagttgagcatcaaaataaatgatagtaaaagattataattcattgaataagaatcagcaaatacatactgatgtaagtaaataaggaaaagtacaaatctgtttcttgcagttgaatgttaattaacaattgtagaagaaataacggagttagaaaaatcactatttggcaatcaccctaatgacaattgattcatacaagaatcatcaatgagtattaaaactcatgggtgaaagtttgatgaggaatagggtatttatagcatcttaaagtatctcttctctattaagtagaaaatttaaacagaagaaagtatactttggagaaatacagcagacaataccttcaaagatatcatcaattatgagaccaactgatactatgtgcctcctgataagatatactgaaagggccacattacttcttggtacacagtcaaaattttaaaaccagaatctaactacaaggaaaatcaaattgaggacactctataaaataagtggactgaactccttaaaaatgtcaatgtcatgaaagacaaagaaaggctaaagaattccatgaggtcaaagaactatgacaactaaacacaattctggatggaatatcaaattaaaaaataacagataaataatattattgggaaagttgaataaatttgaatatggactgtttattagttattagtattataatagtgttaattttcctaattttgttaagactagtgtgcctgttccatgaaaatagaaaatgttcttattctctgaaaatgcatgctaaagtatttaggggtgaatgcaacaatgtctgcagctcattcttgaatcagttcaaagaaaaatgagttacatttatatatatatgtatgtatgtaaacagacatagataaaagtatagatgtgtgtgtgtctttagaaaggggaggattttttttttttttttgctgtgtgttactgaagtgcctatgtctgcgtgttcacactatcatattttgtatgccctggactttataatttctaccttcaaaattagatctactgttggtaattaattcaatatatactggttttttaactactattctcatttcctagcagtaatcttcctgaaaagtcacagaaatgattacattccttgttcttcataataatcactgtttaattaaaataagaatattttagaaaagatctgcggcatagtggttaagaccccagtatttgatgctaaacagatctgatttggataacagaaggtggcactttgctgtttaagctggggaccagacactgtgggtataaatagtaattccaaacacagctccacagagcagcacccttatgacaaggttttcatatgtctatagttaagccagaaaattaagaataatgccataaatatttataaagctgaacatatccaagttaaagacctttatcctgaaattgtatcttttagattattttctaaagactaataccatttaatgtttaaatgttctttggaaatgatggtgagaatacgtgataatgggtcattggttttaatattttatttagccaagtggaaaattggcaacctggtgtcggtcctcccatttgtattttactggtgcatgaaatccaaaagtctagtaaccattgggacagacaactctactgcataagtttgtatgtttgtatatctgtatcacaaagcccagacactcgaactatataaacttgtcgcactaaagacagcaaatatgtctggtaattgcatattcttcatgtgtgcactggaatttcttattatataagaaaataaatgtgtttctaaaccaccatgaattgggtactgctgatagtactattcttcctggcacatggaaatatcccactgaggttgtcaatcaatattgatttaatcagtgtggcagcaaaggcactagaggaggaaaatactctagacaatcaagtatagatgggaaaattgcatcaccaagaaattcttaaaatcacaagtggataatttgcaatatcaattgattttactcaactgcttgagtcctttatcattccgttagaacactcctcatatttgcagataactcagcccctcacctcagcaacaagcaagaggacatcattataaacttcctcaatttctttcctatccagtgaaaaatatctaagtcccttttcccttcccttttccttcccttcccttcctttttctttccttccattctcttcctttttccttcctttttctttccttccattctcttcctttttccttcctttttcttactttacctccccctcctacctttccctttctcccttcctccctctctcccttccttcctctctccctctccttccttccttccttcaatccatacttttatatcttttcagagatcaatttttcccattcatttctacattctcagataccttgctccatgacttgttctacttctcttctatctttattctttccctcttgactgatcctttttgtctgcctttgcattttcaaaatcagtttttctaatcttaaaaaataactttgctcaaccctgatgcatctttattcactgtgtcattatctcattatttttaaaggttagtttctaaagccagggctctatactcactaccttcactcttggttaaaattaaaagaaatataggtcccagtgatatttatgggaaaatttgactgtgaataatcttgttgatataaacactttgggttttcaaaatgttatgctagctgttaactttcccagtaacattatgagggaagggctggaaaatacaaaaggtagacataggaaccgagaacaccacccctatggagccaagctatacatactctgtctctggttatcataaatacatctcctatattcaatgcttgcttagaaaggcatgatgtccacggagcaattcaattgttcactgtgatgggtttttttgttttctcctcatggaatgcaacttttatttat

SEQ ID NO: 556 - DNA, 12989 bp, Homo sapiens
  source 1..12989: mol_type = genomic DNA
accatagagtgaggcgaggatgaagccgagaggatactgcagaggtctctggtgcatgtgtgtatgtgtgcgtttgtgtgtgtttgtgtgtctgtgtgttctgccccagtgagactgcagcccttgtaaatactttgacaccttttgcaagaaggaatctgaacaattgcaactgaaggcacattgttatcatctcgtctttgggtgatgctgttcctcactgcagatggataattttccttttaatcaggtttgggcaattatgaataaggctgctgtatacatccgtgtgcaggattttgtgtggacataagttttcaactcctttggttaaatcctaaggaatttcatatgcagaataaatggtaattaaaatgtgcaggatgacaagatggagcaaacagtgcttgtaccaccaggacctgacagcttcaacttcttcaccagagaatctcttgcggctattgaaagacgcattgcagaagaaaaggcaaagaatcccaaaccagacaaaaaagatgacgacgaaaatggcccaaagccaaatagtgacttggaagctggaaagaaccttccatttatttatggagacattcctccagagatggtgtcagagcccctggaggacctggacccctactatatcaataagaaaacttttatagtattgaataaagggaaggccatcttccggttcagtgccacctctgccctgtacattttaactcccttcaatcctcttaggaaaatagctattaagattttggtacattcattattcagcatgctaattatgtgcactattttgacaaactgtgtgtttatgacaatgagtaaccctcctgattggacaaagaatgtagaatacaccttcacaggaatatatacttttgaatcacttataaaaattattgcaaggggattctgtttagaagattttactttccttcgggatccatggaactggctcgatttcactgtcattacatttgcgtacgtcacagagtttgtggacctgggcaatgtctcggcattgagaacattcagagttctccgagcattgaagacgatttcagtcattccaggcctgaaaaccattgtgggagccctgatccagtctgtgaagaagctctcagatgtaatgatcctgactgtgttctgtctgagcgtatttgctctaattgggctgcagctgttcatgggcaacctgaggaataaatgtatacaatggcctcccaccaatgcttccttggaggaacatagtatagaaaagaatataactgtgaattataatggtacacttataaatgaaactgtctttgagtttgactggaagtcatatattcaagattcaagatatcattatttcctggagggttttttagatgcactactatgtggaaatagctctgatgcaggccaatgtccagagggatatatgtgtgtgaaagctggtagaaatcccaattatggctacacaagctttgataccttcagttgggcttttttgtccttgtttcgactaatgactcaggacttctgggaaaatctttatcaactgacattacgtgctgctgggaaaacgtacatgatattttttgtattggtcattttcttgggctcattctacctaataaatttgatcctggctgtggtggccatggcctacgaggaacagaatcaggccaccttggaagaagcagaacagaaagaggccgaatttcagcagatgattgaacagcttaaaaagcaacaggaggcagctcaggcagcaacggcaactgcctcagaacattccagagagcccagtgcagcaggcaggctctcagacagctcatctgaagcctctaagttgagttccaagagtgctaaggaaagaagaaatcggaggaagaaaagaaaacagaaagagcagtctggtggggaagagaaagatgaggatgaattccaaaaatctgaatctgaggacagcatcaggaggaaaggttttcgcttctccattgaagggaaccgattgacatatgaaaagaggtactcctccccacaccagtctttgttgagcatccgtggctccctattttcaccaaggcgaaatagcagaacaagccttttcagctttagagggcgagcaaaggatgtgggatctgagaacgacttcgcagatgatgagcacagcacctttgaggataacgagagccgtagagattccttgtttgtgccccgacgacacggagagagacgcaacagcaacctgagtcagaccagtaggtcatcccggatgctggcagtgtttccagcgaatgggaagatgcacagcactgtggattgcaatggtgtggtttccttggttggtggaccttcagttcctacatcgcctgttggacagcttctgccagagggaacaaccactgaaactgaaatgagaaagagaaggtcaagttctttccacgtttccatggactttctagaagatccttcccaaaggcaacgagcaatgagtatagccagcattctaacaaatacagtagaagaacttgaagaatccaggcagaaatgcccaccctgttggtataaattttccaacatattcttaatctgggactgttctccatattggttaaaagtgaaacatgttgtcaacctggttgtgatggacccatttgttgacctggccatcaccatctgtattgtcttaaatactcttttcatggccatggagcactatccaatgacggaccatttcaataatgtgcttacagtaggaaacttggttttcactgggatctttacagcagaaatgtttctgaaaattattgccatggatccttactattatttccaagaaggctggaatatctttgacggttttattgtgacgcttagcctggtagaacttggactcgccaatgtggaaggattatctgttctccgttcatttcgattgctgcgagttttcaagttggcaaaatcttggccaacgttaaatatgctaataaagatcatcggcaattccgtgggggctctgggaaatttaaccctcgtcttggccatcatcgtcttcatttttgccgtggtcggcatgcagctctttggtaaaagctacaaagattgtgtctgcaagatcgccagtgattgtcaactcccacgctggcacatgaatgacttcttccactccttcctgattgtgttccgcgtgctgtgtggggagtggatagagaccatgtgggactgtatggaggttgctggtcaagccatgtgccttactgtcttcatgatggtcatggtgattggaaacctagtggtcctgaatctctttctggccttgcttctgagctcatttagtgcagacaaccttgcagccactgatgatgataatgaaatgaataatctccaaattgctgtggataggatgcacaaaggagtagcttatgtgaaaagaaaaatatatgaatttattcaacagtccttcattaggaaacaaaagattttagatgaaattaaaccacttgatgatctaaacaacaagaaagacagttgtatgtccaatcatacagcagaaattgggaaagatcttgactatcttaaagatgtaaatggaactacaagtggtataggaactggcagcagtgttgaaaaatacattattgatgaaagtgattacatgtcattcataaacaaccccagtcttactgtgactgtaccaattgctgtaggagaatctgactttgaaaatttaaacacggaagactttagtagtgaatcggatctggaagaaagcaaagagaaactgaatgaaagcagtagctcatcagaaggtagcactgtggacatcggcgcacctgtagaagaacagcccgtagtggaacctgaagaaactcttgaaccagaagcttgtttcactgaaggctgtgtacaaagattcaagtgttgtcaaatcaatgtggaagaaggcagaggaaaacaatggtggaacctgagaaggacgtgtttccgaatagttgaacataactggtttgagaccttcattgttttcatgattctccttagtagtggtgctctggcatttgaagatatatatattgatcagcgaaagacgattaagacgatgttggaatatgctgacaaggttttcacttacattttcattctggaaatgcttctaaaatgggtggcatatggctatcaaacatatttcaccaatgcctggtgttggctggacttcttaattgttgatgtttcattggtcagtttaacagcaaatgccttgggttactcagaacttggagccatcaaatctctcaggacactaagagctctgagacctctaagagccttatctcgatttgaagggatgagggtggttgtgaatgcccttttaggagcaattccatccatcatgaatgtgcttctggtttgtcttatattctggctaattttcagcatcatgggcgtaaatttgtttgctggcaaattctaccactgtattaacaccacaactggtgacaggtttgacatcgaagacgtgaataatcatactgattgcctaaaactaatagaaagaaatgagactgctcgatggaaaaatgtgaaagtaaactttgataatgtaggatttgggtatctctctttgcttcaagttgccacattcaaaggatggatggatataatgtatgcagcagttgattccagaaatgtggaactccagcctaagtatgaagaaagtctgtacatgtatctttactttgttattttcatcatctttgggtccttcttcaccttgaacctgtttattggtgtcatcatagataatttcaaccagcagaaaaagaagtttggaggtcaagacatctttatgacagaagaacagaagaaatactataatgcaatgaaaaaattaggatcgaaaaaaccgcaaaagcctatacctcgaccaggaaacaaatttcaaggaatggtctttgacttcgtaaccagacaagtttttgacataagcatcatgattctcatctgtcttaacatggtcacaatgatggtggaaacagatgaccagagtgaatatgtgactaccattttgtcacgcatcaatctggtgttcattgtgctatttactggagagtgtgtactgaaactcatctctctacgccattattattttaccattggatggaatatttttgattttgtggttgtcattctctccattgtaggtatgtttcttgccgagctgatagaaaagtatttcgtgtcccctaccctgttccgagtgatccgtcttgctaggattggccgaatcctacgtctgatcaaaggagcaaaggggatccgcacgctgctctttgctttgatgatgtcccttcctgcgttgtttaacatcggcctcctactcttcctagtcatgttcatctacgccatctttgggatgtccaactttgcctatgttaagagggaagttgggatcgatgacatgttcaactttgagacctttggcaacagcatgatctgcctattccaaattacaacctctgctggctgggatggattgctagcacccattctcaacagtaagccacccgactgtgaccctaataaagttaaccctggaagctcagttaagggagactgtgggaacccatctgttggaattttcttttttgtcagttacatcatcatatccttcctggttgtggtgaacatgtacatcgcggtcatcctggagaacttcagtgttgctactgaagaaagtgcagagcctctgagtgaggatgactttgagatgttctatgaggtttgggagaagtttgatcccgatgcaactcagttcatggaatttgaaaaattatctcagtttgcagctgcgcttgaaccgcctctcaatctgccacaaccaaacaaactccagctcattgccatggatttgcccatggtgagtggtgaccggatccactgtcttgatatcttatttgcttttacaaagcgggttctaggagagagtggagagatggatgctctacgaatacagatggaagagcgattcatggcttccaatccttccaaggtctcctatcagccaatcactactactttaaaacgaaaacaagaggaagtatctgctgtcattattcagcgtgcttacagacgccaccttttaaagcgaactgtaaaacaagcttcctttacgtacaataaaaacaaaatcaaaggtggggctaatcttcttataaaagaagacatgataattgacagaataaatgaaaactctattacagaaaaaactgatctgaccatgtccactgcagcttgtccaccttcctatgaccgggtgacaaagccaattgtggaaaaacatgagcaagaaggcaaagatgaaaaagccaaagggaaataaatgaaaataaataaaaataattgggtgacaaattgtttacagcctgtgaaggtgatgtatttttatcaacaggactcctttaggaggtcaatgccaaactgactgtttttacacaaatctccttaaggtcagtgcctacaataagacagtgaccccttgtcagcaaactgtgactctgtgtaaaggggagatgaccttgacaggaggttactgttctcactaccagctgacactgctgaagataagatgcacaatggctagtcagactgtagggaccagtttcaaggggtgcaaacctgtgattttggggttgtttaacatgaaacactttagtgtagtaattgtatccactgtttgcatttcaactgccacatttgtcacatttttatggaatctgttagtggattcatctttttgttaatccatgtgtttattatatgtgactatttttgtaaacgaagtttctgttgagaaataggctaaggacctctataacaggtatgccacctggggggtatggcaaccacatggccctcccagctacacaaagtcgtggtttgcatgagggcatgctgcacttagagatcatgcatgagaaaaagtcacaagaaaaacaaattcttaaatttcaccatatttctgggaggggtaattgggtgataagtggaggtgctttgttgatcttgttttgcgaaatccagcccctagaccaagtagattatttgtgggtaggccagtaaatcttagcaggtgcaaacttcattcaaatgtttggagtcataaatgttatgtttctttttgttgtattaaaaaaaaaacctgaatagtgaatattgcccctcaccctccaccgccagaagactgaattgaccaaaattactctttataaatttctgctttttcctgcactttgtttagccatcttcggctctcagcaaggttgacactgtatatgttaatgaaatgctatttattatgtaaatagtcattttaccctgtggtgcacgtttgagcaaacaaataatgacctaagcacagtatttattgcatcaaatatgtaccacaagaaatgtagagtgcaagctttacacaggtaataaaatgtattctgtaccatttatagatagtttggatgctatcaatgcatgtttatattaccatgctgctgtatctggtttctctcactgctcagaatctcatttatgagaaaccatatgtcagtggtaaagtcaaggaaattgttcaacagatctcatttatttaagtcattaagcaatagtttgcagcactttaacagctttttggttatttttacattttaagtggataacatatggtatatagccagactgtacagacatgtttaaaaaaacacactgcttaacctattaaatatgtgtttagaattttataagcaaatataaatactgtaaaaagtcactttattttatttttcagcattatgtacataaatatgaagaggaaattatcttcaggttgatatcacaatcacttttcttactttctgtccatagtactttttcatgaaagaaatttgctaaataagacatgaaaacaagactgggtagttgtagatttctgctttttaaattacatttgctaattttagattatttcacaattttaaggagcaaaataggttcacgattcatatccaaattatgctttgcaattggaaaagggtttaaaattttatttatatttctggtagtacctgcactaactgaattgaaggtagtgcttatgttatttttgttctttttttctgacttcggtttatgttttcatttctttggagtaatgctgctctagattgttctaaatagaatgtgggcttcataatttttttttccacaaaaacagagtagtcaacttatatagtcaattacatcaggacattttgtgtttcttacagaagcaaaccataggctcctcttttccttaaaactacttagataaactgtattcgtgaactgcatgctggaaaatgctactattatgctaaataatgctaaccaacatttaaaatgtgcaaaactaataaagattacattttttattttattgtttgcccagtcactttttgttaacagaatattctaatgatatggagattttttacattacaaattgggggagaaggggagcgcgcgcgcacacacacacacacacacacacacacacacacacacacagaggcatacccacgttgacaacaaaacctagggtagatatgtcactggaggtagggggtaatgacctcccagaattacaagcagcaggtgtgttctctgttaggaggaagaactggtgtcagaggatagctagtgattctaggaggaagagaagtatggaagccagagtgatggtggatgaccccttgagctatgaaaagaaacccttaaatcatcatttaaaaatttagaattgccatgtgtgtaggatactgtgtttgctcctccagagccactctctctgcttctgcatcattctgtgtgtcccagaagggtgacttctacacattgcaaaaatgggctctcctacctttgagctcccaattggtttggccaatgagaagcaccagtgggaaagcaccagagagagaagattgacataggaatatttcttctccaattccttctttgctgggttggcactggactcattcctccccgaaaagtcatactccaatcagactgcccctcatacaactgaagctactttctctggggtcaggtaatcactcctccccttgctccttcaggtctgctgctgcattgagagtgcttttgtattccttgtagctttctcctaacattgctgacacttttgtaaatgtccccttcatgaaattcttctatatgcctcatttcagcatgccatctgtctcctgcctggctgacacaaggtgattcaacagctcatgaaagtcagcaggaagcaaagatgtgccttgcttcagcttggggtcttaatcttgctaacttttgcagataaagaaaaacagtaactgggggaaccacagtgaagtccagtgcagaattcacagatatcatggaaaggttactcgggtggtccagatagtaaaattaacagtctaaattaatctatctaaatttctgaggaacgagaagccttcccttgtcatcaggtgaagccagaagagggaatatagcctcaaccagaaaagggacagtaattaaaaggcttttcccatccttgtacaatggactgactttgcctcttcataacatcacaatcctaaagcaacacaacaattaattctgatatattagtagctgaaaaaaattcccatttccaactaaggtaggtcagaattataggataaaccctgcagactttttatactacccatccacgccattactcactgttacctttccaaatacaaagagaagaactggtaaaacataatcatataaatctccatattcattttgaaatatttggcatgatattttctgtgctaaaaagtaattattcttcaaagaatgatgaggtcatgtcagtaagacacaggaaccaactagaaggggcttcccactggccaaatctggggcaagttgagcatcaaaataaatgatagtaaaagattataattcattgaataagaatcagcaaatacatactgatgtaagtaaataaggaaaagtacaaatctgtttcttgcagttgaatgttaattaacaattgtagaagaaataacggagttagaaaaatcactatttggcaatcaccctaatgacaattgattcatacaagaatcatcaatgagtattaaaactcatgggtgaaagtttgatgaggaatagggtatttatagcatcttaaagtatctcttctctattaagtagaaaatttaaacagaagaaagtatactttggagaaatacagcagacaataccttcaaagatatcatcaattatgagaccaactgatactatgtgcctcctgataagatatactgaaagggccacattacttcttggtacacagtcaaaattttaaaaccagaatctaactacaaggaaaatcaaattgaggacactctataaaataagtggactgaactccttaaaaatgtcaatgtcatgaaagacaaagaaaggctaaagaattccatgaggtcaaagaactatgacaactaaacacaattctggatggaatatcaaattaaaaaataacagataaataatattattgggaaagttgaataaatttgaatatggactgtttattagttattagtattataatagtgttaattttcctaattttgttaagactagtgtgcctgttccatgaaaatagaaaatgttcttattctctgaaaatgcatgctaaagtatttaggggtgaatgcaacaatgtctgcagctcattcttgaatcagttcaaagaaaaatgagttacatttatatatatatgtatgtatgtaaacagacatagataaaagtatagatgtgtgtgtgtctttagaaaggggaggattttttttttttttttgctgtgtgttactgaagtgcctatgtctgcgtgttcacactatcatattttgtatgccctggactttataatttctaccttcaaaattagatctactgttggtaattaattcaatatatactggttttttaactactattctcatttcctagcagtaatcttcctgaaaagtcacagaaatgattacattccttgttcttcataataatcactgtttaattaaaataagaatattttagaaaagatctgcggcatagtggttaagaccccagtatttgatgctaaacagatctgatttggataacagaaggtggcactttgctgtttaagctggggaccagacactgtgggtataaatagtaattccaaacacagctccacagagcagcacccttatgacaaggttttcatatgtctatagttaagccagaaaattaagaataatgccataaatatttataaagctgaacatatccaagttaaagacctttatcctgaaattgtatcttttagattattttctaaagactaataccatttaatgtttaaatgttctttggaaatgatggtgagaatacgtgataatgggtcattggttttaatattttatttagccaagtggaaaattggcaacctggtgtcggtcctcccatttgtattttactggtgcatgaaatccaaaagtctagtaaccattgggacagacaactctactgcataagtttgtatgtttgtatatctgtatcacaaagcccagacactcgaactatataaacttgtcgcactaaagacagcaaatatgtctggtaattgcatattcttcatgtgtgcactggaatttcttattatataagaaaataaatgtgtttctaaaccaccatgaattgggtactgctgatagtactattcttcctggcacatggaaatatcccactgaggttgtcaatcaatattgatttaatcagtgtggcagcaaaggcactagaggaggaaaatactctagacaatcaagtatagatgggaaaattgcatcaccaagaaattcttaaaatcacaagtggataatttgcaatatcaattgattttactcaactgcttgagtcctttatcattccgttagaacactcctcatatttgcagataactcagcccctcacctcagcaacaagcaagaggacatcattataaacttcctcaatttctttcctatccagtgaaaaatatctaagtcccttttcccttcccttttccttcccttcccttcctttttctttccttccattctcttcctttttccttcctttttctttccttccattctcttcctttttccttcctttttcttactttacctccccctcctacctttccctttctcccttcctccctctctcccttccttcctctctccctctccttccttccttccttcaatccatacttttatatcttttcagagatcaatttttcccattcatttctacattctcagataccttgctccatgacttgttctacttctcttctatctttattctttccctcttgactgatcctttttgtctgcctttgcattttcaaaatcagtttttctaatcttaaaaaataactttgctcaaccctgatgcatctttattcactgtgtcattatctcattatttttaaaggttagtttctaaagccagggctctatactcactaccttcactcttggttaaaattaaaagaaatataggtcccagtgatatttatgggaaaatttgactgtgaataatcttgttgatataaacactttgggttttcaaaatgttatgctagctgttaactttcccagtaacattatgagggaagggctggaaaatacaaaaggtagacataggaaccgagaacaccacccctatggagccaagctatacatactctgtctctggttatcataaatacatctcctatattcaatgcttgcttagaaaggcatgatgtccacggagcaattcaattgttcactgtgatgggtttttttgttttctcctcatggaatgcaacttttatttat

SEQ ID NO: 557 - DNA, 13022 bp, Homo sapiens
  source 1..13022: mol_type = genomic DNA
accatagagtgaggcgaggatgaagccgagaggatactgcagaggtctctggtgcatgtgtgtatgtgtgcgtttgtgtgtgtttgtgtgtctgtgtgttctgccccagtgagactgcagcccttgtaaatactttgacaccttttgcaagaaggaatctgaacaattgcaactgaaggcacattgttatcatctcgtctttgggtgatgctgttcctcactgcagatggataattttccttttaatcaggtttgggcaattatgaataaggctgctgtatacatccgtgtgcaggattttgtgtggacataagttttcaactcctttggttaaatcctaaggaatttcatatgcagaataaatggtaattaaaatgtgcaggatgacaagatggagcaaacagtgcttgtaccaccaggacctgacagcttcaacttcttcaccagagaatctcttgcggctattgaaagacgcattgcagaagaaaaggcaaagaatcccaaaccagacaaaaaagatgacgacgaaaatggcccaaagccaaatagtgacttggaagctggaaagaaccttccatttatttatggagacattcctccagagatggtgtcagagcccctggaggacctggacccctactatatcaataagaaaacttttatagtattgaataaagggaaggccatcttccggttcagtgccacctctgccctgtacattttaactcccttcaatcctcttaggaaaatagctattaagattttggtacattcattattcagcatgctaattatgtgcactattttgacaaactgtgtgtttatgacaatgagtaaccctcctgattggacaaagaatgtagaatacaccttcacaggaatatatacttttgaatcacttataaaaattattgcaaggggattctgtttagaagattttactttccttcgggatccatggaactggctcgatttcactgtcattacatttgcgtacgtcacagagtttgtggacctgggcaatgtctcggcattgagaacattcagagttctccgagcattgaagacgatttcagtcattccaggcctgaaaaccattgtgggagccctgatccagtctgtgaagaagctctcagatgtaatgatcctgactgtgttctgtctgagcgtatttgctctaattgggctgcagctgttcatgggcaacctgaggaataaatgtatacaatggcctcccaccaatgcttccttggaggaacatagtatagaaaagaatataactgtgaattataatggtacacttataaatgaaactgtctttgagtttgactggaagtcatatattcaagattcaagatatcattatttcctggagggttttttagatgcactactatgtggaaatagctctgatgcaggccaatgtccagagggatatatgtgtgtgaaagctggtagaaatcccaattatggctacacaagctttgataccttcagttgggcttttttgtccttgtttcgactaatgactcaggacttctgggaaaatctttatcaactgacattacgtgctgctgggaaaacgtacatgatattttttgtattggtcattttcttgggctcattctacctaataaatttgatcctggctgtggtggccatggcctacgaggaacagaatcaggccaccttggaagaagcagaacagaaagaggccgaatttcagcagatgattgaacagcttaaaaagcaacaggaggcagctcaggcagcaacggcaactgcctcagaacattccagagagcccagtgcagcaggcaggctctcagacagctcatctgaagcctctaagttgagttccaagagtgctaaggaaagaagaaatcggaggaagaaaagaaaacagaaagagcagtctggtggggaagagaaagatgaggatgaattccaaaaatctgaatctgaggacagcatcaggaggaaaggttttcgcttctccattgaagggaaccgattgacatatgaaaagaggtactcctccccacaccagtctttgttgagcatccgtggctccctattttcaccaaggcgaaatagcagaacaagccttttcagctttagagggcgagcaaaggatgtgggatctgagaacgacttcgcagatgatgagcacagcacctttgaggataacgagagccgtagagattccttgtttgtgccccgacgacacggagagagacgcaacagcaacctgagtcagaccagtaggtcatcccggatgctggcagtgtttccagcgaatgggaagatgcacagcactgtggattgcaatggtgtggtttccttggttggtggaccttcagttcctacatcgcctgttggacagcttctgccagaggtgataatagataagccagctactgatgacaatggaacaaccactgaaactgaaatgagaaagagaaggtcaagttctttccacgtttccatggactttctagaagatccttcccaaaggcaacgagcaatgagtatagccagcattctaacaaatacagtagaagaacttgaagaatccaggcagaaatgcccaccctgttggtataaattttccaacatattcttaatctgggactgttctccatattggttaaaagtgaaacatgttgtcaacctggttgtgatggacccatttgttgacctggccatcaccatctgtattgtcttaaatactcttttcatggccatggagcactatccaatgacggaccatttcaataatgtgcttacagtaggaaacttggttttcactgggatctttacagcagaaatgtttctgaaaattattgccatggatccttactattatttccaagaaggctggaatatctttgacggttttattgtgacgcttagcctggtagaacttggactcgccaatgtggaaggattatctgttctccgttcatttcgattgctgcgagttttcaagttggcaaaatcttggccaacgttaaatatgctaataaagatcatcggcaattccgtgggggctctgggaaatttaaccctcgtcttggccatcatcgtcttcatttttgccgtggtcggcatgcagctctttggtaaaagctacaaagattgtgtctgcaagatcgccagtgattgtcaactcccacgctggcacatgaatgacttcttccactccttcctgattgtgttccgcgtgctgtgtggggagtggatagagaccatgtgggactgtatggaggttgctggtcaagccatgtgccttactgtcttcatgatggtcatggtgattggaaacctagtggtcctgaatctctttctggccttgcttctgagctcatttagtgcagacaaccttgcagccactgatgatgataatgaaatgaataatctccaaattgctgtggataggatgcacaaaggagtagcttatgtgaaaagaaaaatatatgaatttattcaacagtccttcattaggaaacaaaagattttagatgaaattaaaccacttgatgatctaaacaacaagaaagacagttgtatgtccaatcatacagcagaaattgggaaagatcttgactatcttaaagatgtaaatggaactacaagtggtataggaactggcagcagtgttgaaaaatacattattgatgaaagtgattacatgtcattcataaacaaccccagtcttactgtgactgtaccaattgctgtaggagaatctgactttgaaaatttaaacacggaagactttagtagtgaatcggatctggaagaaagcaaagagaaactgaatgaaagcagtagctcatcagaaggtagcactgtggacatcggcgcacctgtagaagaacagcccgtagtggaacctgaagaaactcttgaaccagaagcttgtttcactgaaggctgtgtacaaagattcaagtgttgtcaaatcaatgtggaagaaggcagaggaaaacaatggtggaacctgagaaggacgtgtttccgaatagttgaacataactggtttgagaccttcattgttttcatgattctccttagtagtggtgctctggcatttgaagatatatatattgatcagcgaaagacgattaagacgatgttggaatatgctgacaaggttttcacttacattttcattctggaaatgcttctaaaatgggtggcatatggctatcaaacatatttcaccaatgcctggtgttggctggacttcttaattgttgatgtttcattggtcagtttaacagcaaatgccttgggttactcagaacttggagccatcaaatctctcaggacactaagagctctgagacctctaagagccttatctcgatttgaagggatgagggtggttgtgaatgcccttttaggagcaattccatccatcatgaatgtgcttctggtttgtcttatattctggctaattttcagcatcatgggcgtaaatttgtttgctggcaaattctaccactgtattaacaccacaactggtgacaggtttgacatcgaagacgtgaataatcatactgattgcctaaaactaatagaaagaaatgagactgctcgatggaaaaatgtgaaagtaaactttgataatgtaggatttgggtatctctctttgcttcaagttgccacattcaaaggatggatggatataatgtatgcagcagttgattccagaaatgtggaactccagcctaagtatgaagaaagtctgtacatgtatctttactttgttattttcatcatctttgggtccttcttcaccttgaacctgtttattggtgtcatcatagataatttcaaccagcagaaaaagaagtttggaggtcaagacatctttatgacagaagaacagaagaaatactataatgcaatgaaaaaattaggatcgaaaaaaccgcaaaagcctatacctcgaccaggaaacaaatttcaaggaatggtctttgacttcgtaaccagacaagtttttgacataagcatcatgattctcatctgtcttaacatggtcacaatgatggtggaaacagatgaccagagtgaatatgtgactaccattttgtcacgcatcaatctggtgttcattgtgctatttactggagagtgtgtactgaaactcatctctctacgccattattattttaccattggatggaatatttttgattttgtggttgtcattctctccattgtaggtatgtttcttgccgagctgatagaaaagtatttcgtgtcccctaccctgttccgagtgatccgtcttgctaggattggccgaatcctacgtctgatcaaaggagcaaaggggatccgcacgctgctctttgctttgatgatgtcccttcctgcgttgtttaacatcggcctcctactcttcctagtcatgttcatctacgccatctttgggatgtccaactttgcctatgttaagagggaagttgggatcgatgacatgttcaactttgagacctttggcaacagcatgatctgcctattccaaattacaacctctgctggctgggatggattgctagcacccattctcaacagtaagccacccgactgtgaccctaataaagttaaccctggaagctcagttaagggagactgtgggaacccatctgttggaattttcttttttgtcagttacatcatcatatccttcctggttgtggtgaacatgtacatcgcggtcatcctggagaacttcagtgttgctactgaagaaagtgcagagcctctgagtgaggatgactttgagatgttctatgaggtttgggagaagtttgatcccgatgcaactcagttcatggaatttgaaaaattatctcagtttgcagctgcgcttgaaccgcctctcaatctgccacaaccaaacaaactccagctcattgccatggatttgcccatggtgagtggtgaccggatccactgtcttgatatcttatttgcttttacaaagcgggttctaggagagagtggagagatggatgctctacgaatacagatggaagagcgattcatggcttccaatccttccaaggtctcctatcagccaatcactactactttaaaacgaaaacaagaggaagtatctgctgtcattattcagcgtgcttacagacgccaccttttaaagcgaactgtaaaacaagcttcctttacgtacaataaaaacaaaatcaaaggtggggctaatcttcttataaaagaagacatgataattgacagaataaatgaaaactctattacagaaaaaactgatctgaccatgtccactgcagcttgtccaccttcctatgaccgggtgacaaagccaattgtggaaaaacatgagcaagaaggcaaagatgaaaaagccaaagggaaataaatgaaaataaataaaaataattgggtgacaaattgtttacagcctgtgaaggtgatgtatttttatcaacaggactcctttaggaggtcaatgccaaactgactgtttttacacaaatctccttaaggtcagtgcctacaataagacagtgaccccttgtcagcaaactgtgactctgtgtaaaggggagatgaccttgacaggaggttactgttctcactaccagctgacactgctgaagataagatgcacaatggctagtcagactgtagggaccagtttcaaggggtgcaaacctgtgattttggggttgtttaacatgaaacactttagtgtagtaattgtatccactgtttgcatttcaactgccacatttgtcacatttttatggaatctgttagtggattcatctttttgttaatccatgtgtttattatatgtgactatttttgtaaacgaagtttctgttgagaaataggctaaggacctctataacaggtatgccacctggggggtatggcaaccacatggccctcccagctacacaaagtcgtggtttgcatgagggcatgctgcacttagagatcatgcatgagaaaaagtcacaagaaaaacaaattcttaaatttcaccatatttctgggaggggtaattgggtgataagtggaggtgctttgttgatcttgttttgcgaaatccagcccctagaccaagtagattatttgtgggtaggccagtaaatcttagcaggtgcaaacttcattcaaatgtttggagtcataaatgttatgtttctttttgttgtattaaaaaaaaaacctgaatagtgaatattgcccctcaccctccaccgccagaagactgaattgaccaaaattactctttataaatttctgctttttcctgcactttgtttagccatcttcggctctcagcaaggttgacactgtatatgttaatgaaatgctatttattatgtaaatagtcattttaccctgtggtgcacgtttgagcaaacaaataatgacctaagcacagtatttattgcatcaaatatgtaccacaagaaatgtagagtgcaagctttacacaggtaataaaatgtattctgtaccatttatagatagtttggatgctatcaatgcatgtttatattaccatgctgctgtatctggtttctctcactgctcagaatctcatttatgagaaaccatatgtcagtggtaaagtcaaggaaattgttcaacagatctcatttatttaagtcattaagcaatagtttgcagcactttaacagctttttggttatttttacattttaagtggataacatatggtatatagccagactgtacagacatgtttaaaaaaacacactgcttaacctattaaatatgtgtttagaattttataagcaaatataaatactgtaaaaagtcactttattttatttttcagcattatgtacataaatatgaagaggaaattatcttcaggttgatatcacaatcacttttcttactttctgtccatagtactttttcatgaaagaaatttgctaaataagacatgaaaacaagactgggtagttgtagatttctgctttttaaattacatttgctaattttagattatttcacaattttaaggagcaaaataggttcacgattcatatccaaattatgctttgcaattggaaaagggtttaaaattttatttatatttctggtagtacctgcactaactgaattgaaggtagtgcttatgttatttttgttctttttttctgacttcggtttatgttttcatttctttggagtaatgctgctctagattgttctaaatagaatgtgggcttcataatttttttttccacaaaaacagagtagtcaacttatatagtcaattacatcaggacattttgtgtttcttacagaagcaaaccataggctcctcttttccttaaaactacttagataaactgtattcgtgaactgcatgctggaaaatgctactattatgctaaataatgctaaccaacatttaaaatgtgcaaaactaataaagattacattttttattttattgtttgcccagtcactttttgttaacagaatattctaatgatatggagattttttacattacaaattgggggagaaggggagcgcgcgcgcacacacacacacacacacacacacacacacacacacacagaggcatacccacgttgacaacaaaacctagggtagatatgtcactggaggtagggggtaatgacctcccagaattacaagcagcaggtgtgttctctgttaggaggaagaactggtgtcagaggatagctagtgattctaggaggaagagaagtatggaagccagagtgatggtggatgaccccttgagctatgaaaagaaacccttaaatcatcatttaaaaatttagaattgccatgtgtgtaggatactgtgtttgctcctccagagccactctctctgcttctgcatcattctgtgtgtcccagaagggtgacttctacacattgcaaaaatgggctctcctacctttgagctcccaattggtttggccaatgagaagcaccagtgggaaagcaccagagagagaagattgacataggaatatttcttctccaattccttctttgctgggttggcactggactcattcctccccgaaaagtcatactccaatcagactgcccctcatacaactgaagctactttctctggggtcaggtaatcactcctccccttgctccttcaggtctgctgctgcattgagagtgcttttgtattccttgtagctttctcctaacattgctgacacttttgtaaatgtccccttcatgaaattcttctatatgcctcatttcagcatgccatctgtctcctgcctggctgacacaaggtgattcaacagctcatgaaagtcagcaggaagcaaagatgtgccttgcttcagcttggggtcttaatcttgctaacttttgcagataaagaaaaacagtaactgggggaaccacagtgaagtccagtgcagaattcacagatatcatggaaaggttactcgggtggtccagatagtaaaattaacagtctaaattaatctatctaaatttctgaggaacgagaagccttcccttgtcatcaggtgaagccagaagagggaatatagcctcaaccagaaaagggacagtaattaaaaggcttttcccatccttgtacaatggactgactttgcctcttcataacatcacaatcctaaagcaacacaacaattaattctgatatattagtagctgaaaaaaattcccatttccaactaaggtaggtcagaattataggataaaccctgcagactttttatactacccatccacgccattactcactgttacctttccaaatacaaagagaagaactggtaaaacataatcatataaatctccatattcattttgaaatatttggcatgatattttctgtgctaaaaagtaattattcttcaaagaatgatgaggtcatgtcagtaagacacaggaaccaactagaaggggcttcccactggccaaatctggggcaagttgagcatcaaaataaatgatagtaaaagattataattcattgaataagaatcagcaaatacatactgatgtaagtaaataaggaaaagtacaaatctgtttcttgcagttgaatgttaattaacaattgtagaagaaataacggagttagaaaaatcactatttggcaatcaccctaatgacaattgattcatacaagaatcatcaatgagtattaaaactcatgggtgaaagtttgatgaggaatagggtatttatagcatcttaaagtatctcttctctattaagtagaaaatttaaacagaagaaagtatactttggagaaatacagcagacaataccttcaaagatatcatcaattatgagaccaactgatactatgtgcctcctgataagatatactgaaagggccacattacttcttggtacacagtcaaaattttaaaaccagaatctaactacaaggaaaatcaaattgaggacactctataaaataagtggactgaactccttaaaaatgtcaatgtcatgaaagacaaagaaaggctaaagaattccatgaggtcaaagaactatgacaactaaacacaattctggatggaatatcaaattaaaaaataacagataaataatattattgggaaagttgaataaatttgaatatggactgtttattagttattagtattataatagtgttaattttcctaattttgttaagactagtgtgcctgttccatgaaaatagaaaatgttcttattctctgaaaatgcatgctaaagtatttaggggtgaatgcaacaatgtctgcagctcattcttgaatcagttcaaagaaaaatgagttacatttatatatatatgtatgtatgtaaacagacatagataaaagtatagatgtgtgtgtgtctttagaaaggggaggattttttttttttttttgctgtgtgttactgaagtgcctatgtctgcgtgttcacactatcatattttgtatgccctggactttataatttctaccttcaaaattagatctactgttggtaattaattcaatatatactggttttttaactactattctcatttcctagcagtaatcttcctgaaaagtcacagaaatgattacattccttgttcttcataataatcactgtttaattaaaataagaatattttagaaaagatctgcggcatagtggttaagaccccagtatttgatgctaaacagatctgatttggataacagaaggtggcactttgctgtttaagctggggaccagacactgtgggtataaatagtaattccaaacacagctccacagagcagcacccttatgacaaggttttcatatgtctatagttaagccagaaaattaagaataatgccataaatatttataaagctgaacatatccaagttaaagacctttatcctgaaattgtatcttttagattattttctaaagactaataccatttaatgtttaaatgttctttggaaatgatggtgagaatacgtgataatgggtcattggttttaatattttatttagccaagtggaaaattggcaacctggtgtcggtcctcccatttgtattttactggtgcatgaaatccaaaagtctagtaaccattgggacagacaactctactgcataagtttgtatgtttgtatatctgtatcacaaagcccagacactcgaactatataaacttgtcgcactaaagacagcaaatatgtctggtaattgcatattcttcatgtgtgcactggaatttcttattatataagaaaataaatgtgtttctaaaccaccatgaattgggtactgctgatagtactattcttcctggcacatggaaatatcccactgaggttgtcaatcaatattgatttaatcagtgtggcagcaaaggcactagaggaggaaaatactctagacaatcaagtatagatgggaaaattgcatcaccaagaaattcttaaaatcacaagtggataatttgcaatatcaattgattttactcaactgcttgagtcctttatcattccgttagaacactcctcatatttgcagataactcagcccctcacctcagcaacaagcaagaggacatcattataaacttcctcaatttctttcctatccagtgaaaaatatctaagtcccttttcccttcccttttccttcccttcccttcctttttctttccttccattctcttcctttttccttcctttttctttccttccattctcttcctttttccttcctttttcttactttacctccccctcctacctttccctttctcccttcctccctctctcccttccttcctctctccctctccttccttccttccttcaatccatacttttatatcttttcagagatcaatttttcccattcatttctacattctcagataccttgctccatgacttgttctacttctcttctatctttattctttccctcttgactgatcctttttgtctgcctttgcattttcaaaatcagtttttctaatcttaaaaaataactttgctcaaccctgatgcatctttattcactgtgtcattatctcattatttttaaaggttagtttctaaagccagggctctatactcactaccttcactcttggttaaaattaaaagaaatataggtcccagtgatatttatgggaaaatttgactgtgaataatcttgttgatataaacactttgggttttcaaaatgttatgctagctgttaactttcccagtaacattatgagggaagggctggaaaatacaaaaggtagacataggaaccgagaacaccacccctatggagccaagctatacatactctgtctctggttatcataaatacatctcctatattcaatgcttgcttagaaaggcatgatgtccacggagcaattcaattgttcactgtgatgggtttttttgttttctcctcatggaatgcaacttttatttat

SEQ ID NO: 558 - DNA, 12941 bp, Homo sapiens
  source 1..12941: mol_type = genomic DNA
accatagagtgaggcgaggatgaagccgagaggatactgcagaggtctctggtgcatgtgtgtatgtgtgcgtttgtgtgtgtttgtgtgtctgtgtgttctgccccagtgagactgcagcccttgtaaatactttgacaccttttgcaagaaggaatctgaacaattgcaactgaaggcacattgttatcatctcgtctttgggtgatgctgttcctcactgcagatggataattttccttttaatcaggtttgggcaattatgaataaggctgctgtatacatccgtgtgcaggattttgtgtggacataagttttcaactcctttggttaaatcctaaggaatttcatatgcagaataaatggtaattaaaatgtgcaggatgacaagatggagcaaacagtgcttgtaccaccaggacctgacagcttcaacttcttcaccagagaatctcttgcggctattgaaagacgcattgcagaagaaaaggcaaagaatcccaaaccagacaaaaaagatgacgacgaaaatggcccaaagccaaatagtgacttggaagctggaaagaaccttccatttatttatggagacattcctccagagatggtgtcagagcccctggaggacctggacccctactatatcaataagaaaacttttatagtattgaataaagggaaggccatcttccggttcagtgccacctctgccctgtacattttaactcccttcaatcctcttaggaaaatagctattaagattttggtacattcattattcagcatgctaattatgtgcactattttgacaaactgtgtgtttatgacaatgagtaaccctcctgattggacaaagaatgtagaatacaccttcacaggaatatatacttttgaatcacttataaaaattattgcaaggggattctgtttagaagattttactttccttcgggatccatggaactggctcgatttcactgtcattacatttgcgtacgtcacagagtttgtggacctgggcaatgtctcggcattgagaacattcagagttctccgagcattgaagacgatttcagtcattccaggcctgaaaaccattgtgggagccctgatccagtctgtgaagaagctctcagatgtaatgatcctgactgtgttctgtctgagcgtatttgctctaattgggctgcagctgttcatgggcaacctgaggaataaatgtatacaatggcctcccaccaatgcttccttggaggaacatagtatagaaaagaatataactgtgaattataatggtacacttataaatgaaactgtctttgagtttgactggaagtcatatattcaagattcaagatatcattatttcctggagggttttttagatgcactactatgtggaaatagctctgatgcaggccaatgtccagagggatatatgtgtgtgaaagctggtagaaatcccaattatggctacacaagctttgataccttcagttgggcttttttgtccttgtttcgactaatgactcaggacttctgggaaaatctttatcaactgacattacgtgctgctgggaaaacgtacatgatattttttgtattggtcattttcttgggctcattctacctaataaatttgatcctggctgtggtggccatggcctacgaggaacagaatcaggccaccttggaagaagcagaacagaaagaggccgaatttcagcagatgattgaacagcttaaaaagcaacaggaggcagctcagcaggcagcaacggcaactgcctcagaacattccagagagcccagtgcagcaggcaggctctcagacagctcatctgaagcctctaagttgagttccaagagtgctaaggaaagaagaaatcggaggaagaaaagaaaacagaaagagcagtctggtggggaagagaaagatgaggatgaattccaaaaatctgaatctgaggacagcatcaggaggaaaggttttcgcttctccattgaagggaaccgattgacatatgaaaagaggtactcctccccacaccagtctttgttgagcatccgtggctccctattttcaccaaggcgaaatagcagaacaagccttttcagctttagagggcgagcaaaggatgtgggatctgagaacgacttcgcagatgatgagcacagcacctttgaggataacgagagccgtagagattccttgtttgtgccccgacgacacggagagagacgcaacagcaacctgagtcagaccagtaggtcatcccggatgctggcagtgtttccagcgaatgggaagatgcacagcactgtggattgcaatggtgtggtttccttgggaacaaccactgaaactgaaatgagaaagagaaggtcaagttctttccacgtttccatggactttctagaagatccttcccaaaggcaacgagcaatgagtatagccagcattctaacaaatacagtagaagaacttgaagaatccaggcagaaatgcccaccctgttggtataaattttccaacatattcttaatctgggactgttctccatattggttaaaagtgaaacatgttgtcaacctggttgtgatggacccatttgttgacctggccatcaccatctgtattgtcttaaatactcttttcatggccatggagcactatccaatgacggaccatttcaataatgtgcttacagtaggaaacttggttttcactgggatctttacagcagaaatgtttctgaaaattattgccatggatccttactattatttccaagaaggctggaatatctttgacggttttattgtgacgcttagcctggtagaacttggactcgccaatgtggaaggattatctgttctccgttcatttcgattgctgcgagttttcaagttggcaaaatcttggccaacgttaaatatgctaataaagatcatcggcaattccgtgggggctctgggaaatttaaccctcgtcttggccatcatcgtcttcatttttgccgtggtcggcatgcagctctttggtaaaagctacaaagattgtgtctgcaagatcgccagtgattgtcaactcccacgctggcacatgaatgacttcttccactccttcctgattgtgttccgcgtgctgtgtggggagtggatagagaccatgtgggactgtatggaggttgctggtcaagccatgtgccttactgtcttcatgatggtcatggtgattggaaacctagtggtcctgaatctctttctggccttgcttctgagctcatttagtgcagacaaccttgcagccactgatgatgataatgaaatgaataatctccaaattgctgtggataggatgcacaaaggagtagcttatgtgaaaagaaaaatatatgaatttattcaacagtccttcattaggaaacaaaagattttagatgaaattaaaccacttgatgatctaaacaacaagaaagacagttgtatgtccaatcatacagcagaaattgggaaagatcttgactatcttaaagatgtaaatggaactacaagtggtataggaactggcagcagtgttgaaaaatacattattgatgaaagtgattacatgtcattcataaacaaccccagtcttactgtgactgtaccaattgctgtaggagaatctgactttgaaaatttaaacacggaagactttagtagtgaatcggatctggaagaaagcaaagagaaactgaatgaaagcagtagctcatcagaaggtagcactgtggacatcggcgcacctgtagaagaacagcccgtagtggaacctgaagaaactcttgaaccagaagcttgtttcactgaaggctgtgtacaaagattcaagtgttgtcaaatcaatgtggaagaaggcagaggaaaacaatggtggaacctgagaaggacgtgtttccgaatagttgaacataactggtttgagaccttcattgttttcatgattctccttagtagtggtgctctggcatttgaagatatatatattgatcagcgaaagacgattaagacgatgttggaatatgctgacaaggttttcacttacattttcattctggaaatgcttctaaaatgggtggcatatggctatcaaacatatttcaccaatgcctggtgttggctggacttcttaattgttgatgtttcattggtcagtttaacagcaaatgccttgggttactcagaacttggagccatcaaatctctcaggacactaagagctctgagacctctaagagccttatctcgatttgaagggatgagggtggttgtgaatgcccttttaggagcaattccatccatcatgaatgtgcttctggtttgtcttatattctggctaattttcagcatcatgggcgtaaatttgtttgctggcaaattctaccactgtattaacaccacaactggtgacaggtttgacatcgaagacgtgaataatcatactgattgcctaaaactaatagaaagaaatgagactgctcgatggaaaaatgtgaaagtaaactttgataatgtaggatttgggtatctctctttgcttcaagttgccacattcaaaggatggatggatataatgtatgcagcagttgattccagaaatgtggaactccagcctaagtatgaagaaagtctgtacatgtatctttactttgttattttcatcatctttgggtccttcttcaccttgaacctgtttattggtgtcatcatagataatttcaaccagcagaaaaagaagtttggaggtcaagacatctttatgacagaagaacagaagaaatactataatgcaatgaaaaaattaggatcgaaaaaaccgcaaaagcctatacctcgaccaggaaacaaatttcaaggaatggtctttgacttcgtaaccagacaagtttttgacataagcatcatgattctcatctgtcttaacatggtcacaatgatggtggaaacagatgaccagagtgaatatgtgactaccattttgtcacgcatcaatctggtgttcattgtgctatttactggagagtgtgtactgaaactcatctctctacgccattattattttaccattggatggaatatttttgattttgtggttgtcattctctccattgtaggtatgtttcttgccgagctgatagaaaagtatttcgtgtcccctaccctgttccgagtgatccgtcttgctaggattggccgaatcctacgtctgatcaaaggagcaaaggggatccgcacgctgctctttgctttgatgatgtcccttcctgcgttgtttaacatcggcctcctactcttcctagtcatgttcatctacgccatctttgggatgtccaactttgcctatgttaagagggaagttgggatcgatgacatgttcaactttgagacctttggcaacagcatgatctgcctattccaaattacaacctctgctggctgggatggattgctagcacccattctcaacagtaagccacccgactgtgaccctaataaagttaaccctggaagctcagttaagggagactgtgggaacccatctgttggaattttcttttttgtcagttacatcatcatatccttcctggttgtggtgaacatgtacatcgcggtcatcctggagaacttcagtgttgctactgaagaaagtgcagagcctctgagtgaggatgactttgagatgttctatgaggtttgggagaagtttgatcccgatgcaactcagttcatggaatttgaaaaattatctcagtttgcagctgcgcttgaaccgcctctcaatctgccacaaccaaacaaactccagctcattgccatggatttgcccatggtgagtggtgaccggatccactgtcttgatatcttatttgcttttacaaagcgggttctaggagagagtggagagatggatgctctacgaatacagatggaagagcgattcatggcttccaatccttccaaggtctcctatcagccaatcactactactttaaaacgaaaacaagaggaagtatctgctgtcattattcagcgtgcttacagacgccaccttttaaagcgaactgtaaaacaagcttcctttacgtacaataaaaacaaaatcaaaggtggggctaatcttcttataaaagaagacatgataattgacagaataaatgaaaactctattacagaaaaaactgatctgaccatgtccactgcagcttgtccaccttcctatgaccgggtgacaaagccaattgtggaaaaacatgagcaagaaggcaaagatgaaaaagccaaagggaaataaatgaaaataaataaaaataattgggtgacaaattgtttacagcctgtgaaggtgatgtatttttatcaacaggactcctttaggaggtcaatgccaaactgactgtttttacacaaatctccttaaggtcagtgcctacaataagacagtgaccccttgtcagcaaactgtgactctgtgtaaaggggagatgaccttgacaggaggttactgttctcactaccagctgacactgctgaagataagatgcacaatggctagtcagactgtagggaccagtttcaaggggtgcaaacctgtgattttggggttgtttaacatgaaacactttagtgtagtaattgtatccactgtttgcatttcaactgccacatttgtcacatttttatggaatctgttagtggattcatctttttgttaatccatgtgtttattatatgtgactatttttgtaaacgaagtttctgttgagaaataggctaaggacctctataacaggtatgccacctggggggtatggcaaccacatggccctcccagctacacaaagtcgtggtttgcatgagggcatgctgcacttagagatcatgcatgagaaaaagtcacaagaaaaacaaattcttaaatttcaccatatttctgggaggggtaattgggtgataagtggaggtgctttgttgatcttgttttgcgaaatccagcccctagaccaagtagattatttgtgggtaggccagtaaatcttagcaggtgcaaacttcattcaaatgtttggagtcataaatgttatgtttctttttgttgtattaaaaaaaaaacctgaatagtgaatattgcccctcaccctccaccgccagaagactgaattgaccaaaattactctttataaatttctgctttttcctgcactttgtttagccatcttcggctctcagcaaggttgacactgtatatgttaatgaaatgctatttattatgtaaatagtcattttaccctgtggtgcacgtttgagcaaacaaataatgacctaagcacagtatttattgcatcaaatatgtaccacaagaaatgtagagtgcaagctttacacaggtaataaaatgtattctgtaccatttatagatagtttggatgctatcaatgcatgtttatattaccatgctgctgtatctggtttctctcactgctcagaatctcatttatgagaaaccatatgtcagtggtaaagtcaaggaaattgttcaacagatctcatttatttaagtcattaagcaatagtttgcagcactttaacagctttttggttatttttacattttaagtggataacatatggtatatagccagactgtacagacatgtttaaaaaaacacactgcttaacctattaaatatgtgtttagaattttataagcaaatataaatactgtaaaaagtcactttattttatttttcagcattatgtacataaatatgaagaggaaattatcttcaggttgatatcacaatcacttttcttactttctgtccatagtactttttcatgaaagaaatttgctaaataagacatgaaaacaagactgggtagttgtagatttctgctttttaaattacatttgctaattttagattatttcacaattttaaggagcaaaataggttcacgattcatatccaaattatgctttgcaattggaaaagggtttaaaattttatttatatttctggtagtacctgcactaactgaattgaaggtagtgcttatgttatttttgttctttttttctgacttcggtttatgttttcatttctttggagtaatgctgctctagattgttctaaatagaatgtgggcttcataatttttttttccacaaaaacagagtagtcaacttatatagtcaattacatcaggacattttgtgtttcttacagaagcaaaccataggctcctcttttccttaaaactacttagataaactgtattcgtgaactgcatgctggaaaatgctactattatgctaaataatgctaaccaacatttaaaatgtgcaaaactaataaagattacattttttattttattgtttgcccagtcactttttgttaacagaatattctaatgatatggagattttttacattacaaattgggggagaaggggagcgcgcgcgcacacacacacacacacacacacacacacacacacacacagaggcatacccacgttgacaacaaaacctagggtagatatgtcactggaggtagggggtaatgacctcccagaattacaagcagcaggtgtgttctctgttaggaggaagaactggtgtcagaggatagctagtgattctaggaggaagagaagtatggaagccagagtgatggtggatgaccccttgagctatgaaaagaaacccttaaatcatcatttaaaaatttagaattgccatgtgtgtaggatactgtgtttgctcctccagagccactctctctgcttctgcatcattctgtgtgtcccagaagggtgacttctacacattgcaaaaatgggctctcctacctttgagctcccaattggtttggccaatgagaagcaccagtgggaaagcaccagagagagaagattgacataggaatatttcttctccaattccttctttgctgggttggcactggactcattcctccccgaaaagtcatactccaatcagactgcccctcatacaactgaagctactttctctggggtcaggtaatcactcctccccttgctccttcaggtctgctgctgcattgagagtgcttttgtattccttgtagctttctcctaacattgctgacacttttgtaaatgtccccttcatgaaattcttctatatgcctcatttcagcatgccatctgtctcctgcctggctgacacaaggtgattcaacagctcatgaaagtcagcaggaagcaaagatgtgccttgcttcagcttggggtcttaatcttgctaacttttgcagataaagaaaaacagtaactgggggaaccacagtgaagtccagtgcagaattcacagatatcatggaaaggttactcgggtggtccagatagtaaaattaacagtctaaattaatctatctaaatttctgaggaacgagaagccttcccttgtcatcaggtgaagccagaagagggaatatagcctcaaccagaaaagggacagtaattaaaaggcttttcccatccttgtacaatggactgactttgcctcttcataacatcacaatcctaaagcaacacaacaattaattctgatatattagtagctgaaaaaaattcccatttccaactaaggtaggtcagaattataggataaaccctgcagactttttatactacccatccacgccattactcactgttacctttccaaatacaaagagaagaactggtaaaacataatcatataaatctccatattcattttgaaatatttggcatgatattttctgtgctaaaaagtaattattcttcaaagaatgatgaggtcatgtcagtaagacacaggaaccaactagaaggggcttcccactggccaaatctggggcaagttgagcatcaaaataaatgatagtaaaagattataattcattgaataagaatcagcaaatacatactgatgtaagtaaataaggaaaagtacaaatctgtttcttgcagttgaatgttaattaacaattgtagaagaaataacggagttagaaaaatcactatttggcaatcaccctaatgacaattgattcatacaagaatcatcaatgagtattaaaactcatgggtgaaagtttgatgaggaatagggtatttatagcatcttaaagtatctcttctctattaagtagaaaatttaaacagaagaaagtatactttggagaaatacagcagacaataccttcaaagatatcatcaattatgagaccaactgatactatgtgcctcctgataagatatactgaaagggccacattacttcttggtacacagtcaaaattttaaaaccagaatctaactacaaggaaaatcaaattgaggacactctataaaataagtggactgaactccttaaaaatgtcaatgtcatgaaagacaaagaaaggctaaagaattccatgaggtcaaagaactatgacaactaaacacaattctggatggaatatcaaattaaaaaataacagataaataatattattgggaaagttgaataaatttgaatatggactgtttattagttattagtattataatagtgttaattttcctaattttgttaagactagtgtgcctgttccatgaaaatagaaaatgttcttattctctgaaaatgcatgctaaagtatttaggggtgaatgcaacaatgtctgcagctcattcttgaatcagttcaaagaaaaatgagttacatttatatatatatgtatgtatgtaaacagacatagataaaagtatagatgtgtgtgtgtctttagaaaggggaggattttttttttttttttgctgtgtgttactgaagtgcctatgtctgcgtgttcacactatcatattttgtatgccctggactttataatttctaccttcaaaattagatctactgttggtaattaattcaatatatactggttttttaactactattctcatttcctagcagtaatcttcctgaaaagtcacagaaatgattacattccttgttcttcataataatcactgtttaattaaaataagaatattttagaaaagatctgcggcatagtggttaagaccccagtatttgatgctaaacagatctgatttggataacagaaggtggcactttgctgtttaagctggggaccagacactgtgggtataaatagtaattccaaacacagctccacagagcagcacccttatgacaaggttttcatatgtctatagttaagccagaaaattaagaataatgccataaatatttataaagctgaacatatccaagttaaagacctttatcctgaaattgtatcttttagattattttctaaagactaataccatttaatgtttaaatgttctttggaaatgatggtgagaatacgtgataatgggtcattggttttaatattttatttagccaagtggaaaattggcaacctggtgtcggtcctcccatttgtattttactggtgcatgaaatccaaaagtctagtaaccattgggacagacaactctactgcataagtttgtatgtttgtatatctgtatcacaaagcccagacactcgaactatataaacttgtcgcactaaagacagcaaatatgtctggtaattgcatattcttcatgtgtgcactggaatttcttattatataagaaaataaatgtgtttctaaaccaccatgaattgggtactgctgatagtactattcttcctggcacatggaaatatcccactgaggttgtcaatcaatattgatttaatcagtgtggcagcaaaggcactagaggaggaaaatactctagacaatcaagtatagatgggaaaattgcatcaccaagaaattcttaaaatcacaagtggataatttgcaatatcaattgattttactcaactgcttgagtcctttatcattccgttagaacactcctcatatttgcagataactcagcccctcacctcagcaacaagcaagaggacatcattataaacttcctcaatttctttcctatccagtgaaaaatatctaagtcccttttcccttcccttttccttcccttcccttcctttttctttccttccattctcttcctttttccttcctttttctttccttccattctcttcctttttccttcctttttcttactttacctccccctcctacctttccctttctcccttcctccctctctcccttccttcctctctccctctccttccttccttccttcaatccatacttttatatcttttcagagatcaatttttcccattcatttctacattctcagataccttgctccatgacttgttctacttctcttctatctttattctttccctcttgactgatcctttttgtctgcctttgcattttcaaaatcagtttttctaatcttaaaaaataactttgctcaaccctgatgcatctttattcactgtgtcattatctcattatttttaaaggttagtttctaaagccagggctctatactcactaccttcactcttggttaaaattaaaagaaatataggtcccagtgatatttatgggaaaatttgactgtgaataatcttgttgatataaacactttgggttttcaaaatgttatgctagctgttaactttcccagtaacattatgagggaagggctggaaaatacaaaaggtagacataggaaccgagaacaccacccctatggagccaagctatacatactctgtctctggttatcataaatacatctcctatattcaatgcttgcttagaaaggcatgatgtccacggagcaattcaattgttcactgtgatgggtttttttgttttctcctcatggaatgcaacttttatttat

SEQ ID NO: 559 - DNA, 12992 bp, Homo sapiens
  source 1..12992: mol_type = genomic DNA
accatagagtgaggcgaggatgaagccgagaggatactgcagaggtctctggtgcatgtgtgtatgtgtgcgtttgtgtgtgtttgtgtgtctgtgtgttctgccccagtgagactgcagcccttgtaaatactttgacaccttttgcaagaaggaatctgaacaattgcaactgaaggcacattgttatcatctcgtctttgggtgatgctgttcctcactgcagatggataattttccttttaatcaggtttgggcaattatgaataaggctgctgtatacatccgtgtgcaggattttgtgtggacataagttttcaactcctttggttaaatcctaaggaatttcatatgcagaataaatggtaattaaaatgtgcaggatgacaagatggagcaaacagtgcttgtaccaccaggacctgacagcttcaacttcttcaccagagaatctcttgcggctattgaaagacgcattgcagaagaaaaggcaaagaatcccaaaccagacaaaaaagatgacgacgaaaatggcccaaagccaaatagtgacttggaagctggaaagaaccttccatttatttatggagacattcctccagagatggtgtcagagcccctggaggacctggacccctactatatcaataagaaaacttttatagtattgaataaagggaaggccatcttccggttcagtgccacctctgccctgtacattttaactcccttcaatcctcttaggaaaatagctattaagattttggtacattcattattcagcatgctaattatgtgcactattttgacaaactgtgtgtttatgacaatgagtaaccctcctgattggacaaagaatgtagaatacaccttcacaggaatatatacttttgaatcacttataaaaattattgcaaggggattctgtttagaagattttactttccttcgggatccatggaactggctcgatttcactgtcattacatttgcgtacgtcacagagtttgtggacctgggcaatgtctcggcattgagaacattcagagttctccgagcattgaagacgatttcagtcattccaggcctgaaaaccattgtgggagccctgatccagtctgtgaagaagctctcagatgtaatgatcctgactgtgttctgtctgagcgtatttgctctaattgggctgcagctgttcatgggcaacctgaggaataaatgtatacaatggcctcccaccaatgcttccttggaggaacatagtatagaaaagaatataactgtgaattataatggtacacttataaatgaaactgtctttgagtttgactggaagtcatatattcaagattcaagatatcattatttcctggagggttttttagatgcactactatgtggaaatagctctgatgcaggccaatgtccagagggatatatgtgtgtgaaagctggtagaaatcccaattatggctacacaagctttgataccttcagttgggcttttttgtccttgtttcgactaatgactcaggacttctgggaaaatctttatcaactgacattacgtgctgctgggaaaacgtacatgatattttttgtattggtcattttcttgggctcattctacctaataaatttgatcctggctgtggtggccatggcctacgaggaacagaatcaggccaccttggaagaagcagaacagaaagaggccgaatttcagcagatgattgaacagcttaaaaagcaacaggaggcagctcagcaggcagcaacggcaactgcctcagaacattccagagagcccagtgcagcaggcaggctctcagacagctcatctgaagcctctaagttgagttccaagagtgctaaggaaagaagaaatcggaggaagaaaagaaaacagaaagagcagtctggtggggaagagaaagatgaggatgaattccaaaaatctgaatctgaggacagcatcaggaggaaaggttttcgcttctccattgaagggaaccgattgacatatgaaaagaggtactcctccccacaccagtctttgttgagcatccgtggctccctattttcaccaaggcgaaatagcagaacaagccttttcagctttagagggcgagcaaaggatgtgggatctgagaacgacttcgcagatgatgagcacagcacctttgaggataacgagagccgtagagattccttgtttgtgccccgacgacacggagagagacgcaacagcaacctgagtcagaccagtaggtcatcccggatgctggcagtgtttccagcgaatgggaagatgcacagcactgtggattgcaatggtgtggtttccttggttggtggaccttcagttcctacatcgcctgttggacagcttctgccagagggaacaaccactgaaactgaaatgagaaagagaaggtcaagttctttccacgtttccatggactttctagaagatccttcccaaaggcaacgagcaatgagtatagccagcattctaacaaatacagtagaagaacttgaagaatccaggcagaaatgcccaccctgttggtataaattttccaacatattcttaatctgggactgttctccatattggttaaaagtgaaacatgttgtcaacctggttgtgatggacccatttgttgacctggccatcaccatctgtattgtcttaaatactcttttcatggccatggagcactatccaatgacggaccatttcaataatgtgcttacagtaggaaacttggttttcactgggatctttacagcagaaatgtttctgaaaattattgccatggatccttactattatttccaagaaggctggaatatctttgacggttttattgtgacgcttagcctggtagaacttggactcgccaatgtggaaggattatctgttctccgttcatttcgattgctgcgagttttcaagttggcaaaatcttggccaacgttaaatatgctaataaagatcatcggcaattccgtgggggctctgggaaatttaaccctcgtcttggccatcatcgtcttcatttttgccgtggtcggcatgcagctctttggtaaaagctacaaagattgtgtctgcaagatcgccagtgattgtcaactcccacgctggcacatgaatgacttcttccactccttcctgattgtgttccgcgtgctgtgtggggagtggatagagaccatgtgggactgtatggaggttgctggtcaagccatgtgccttactgtcttcatgatggtcatggtgattggaaacctagtggtcctgaatctctttctggccttgcttctgagctcatttagtgcagacaaccttgcagccactgatgatgataatgaaatgaataatctccaaattgctgtggataggatgcacaaaggagtagcttatgtgaaaagaaaaatatatgaatttattcaacagtccttcattaggaaacaaaagattttagatgaaattaaaccacttgatgatctaaacaacaagaaagacagttgtatgtccaatcatacagcagaaattgggaaagatcttgactatcttaaagatgtaaatggaactacaagtggtataggaactggcagcagtgttgaaaaatacattattgatgaaagtgattacatgtcattcataaacaaccccagtcttactgtgactgtaccaattgctgtaggagaatctgactttgaaaatttaaacacggaagactttagtagtgaatcggatctggaagaaagcaaagagaaactgaatgaaagcagtagctcatcagaaggtagcactgtggacatcggcgcacctgtagaagaacagcccgtagtggaacctgaagaaactcttgaaccagaagcttgtttcactgaaggctgtgtacaaagattcaagtgttgtcaaatcaatgtggaagaaggcagaggaaaacaatggtggaacctgagaaggacgtgtttccgaatagttgaacataactggtttgagaccttcattgttttcatgattctccttagtagtggtgctctggcatttgaagatatatatattgatcagcgaaagacgattaagacgatgttggaatatgctgacaaggttttcacttacattttcattctggaaatgcttctaaaatgggtggcatatggctatcaaacatatttcaccaatgcctggtgttggctggacttcttaattgttgatgtttcattggtcagtttaacagcaaatgccttgggttactcagaacttggagccatcaaatctctcaggacactaagagctctgagacctctaagagccttatctcgatttgaagggatgagggtggttgtgaatgcccttttaggagcaattccatccatcatgaatgtgcttctggtttgtcttatattctggctaattttcagcatcatgggcgtaaatttgtttgctggcaaattctaccactgtattaacaccacaactggtgacaggtttgacatcgaagacgtgaataatcatactgattgcctaaaactaatagaaagaaatgagactgctcgatggaaaaatgtgaaagtaaactttgataatgtaggatttgggtatctctctttgcttcaagttgccacattcaaaggatggatggatataatgtatgcagcagttgattccagaaatgtggaactccagcctaagtatgaagaaagtctgtacatgtatctttactttgttattttcatcatctttgggtccttcttcaccttgaacctgtttattggtgtcatcatagataatttcaaccagcagaaaaagaagtttggaggtcaagacatctttatgacagaagaacagaagaaatactataatgcaatgaaaaaattaggatcgaaaaaaccgcaaaagcctatacctcgaccaggaaacaaatttcaaggaatggtctttgacttcgtaaccagacaagtttttgacataagcatcatgattctcatctgtcttaacatggtcacaatgatggtggaaacagatgaccagagtgaatatgtgactaccattttgtcacgcatcaatctggtgttcattgtgctatttactggagagtgtgtactgaaactcatctctctacgccattattattttaccattggatggaatatttttgattttgtggttgtcattctctccattgtaggtatgtttcttgccgagctgatagaaaagtatttcgtgtcccctaccctgttccgagtgatccgtcttgctaggattggccgaatcctacgtctgatcaaaggagcaaaggggatccgcacgctgctctttgctttgatgatgtcccttcctgcgttgtttaacatcggcctcctactcttcctagtcatgttcatctacgccatctttgggatgtccaactttgcctatgttaagagggaagttgggatcgatgacatgttcaactttgagacctttggcaacagcatgatctgcctattccaaattacaacctctgctggctgggatggattgctagcacccattctcaacagtaagccacccgactgtgaccctaataaagttaaccctggaagctcagttaagggagactgtgggaacccatctgttggaattttcttttttgtcagttacatcatcatatccttcctggttgtggtgaacatgtacatcgcggtcatcctggagaacttcagtgttgctactgaagaaagtgcagagcctctgagtgaggatgactttgagatgttctatgaggtttgggagaagtttgatcccgatgcaactcagttcatggaatttgaaaaattatctcagtttgcagctgcgcttgaaccgcctctcaatctgccacaaccaaacaaactccagctcattgccatggatttgcccatggtgagtggtgaccggatccactgtcttgatatcttatttgcttttacaaagcgggttctaggagagagtggagagatggatgctctacgaatacagatggaagagcgattcatggcttccaatccttccaaggtctcctatcagccaatcactactactttaaaacgaaaacaagaggaagtatctgctgtcattattcagcgtgcttacagacgccaccttttaaagcgaactgtaaaacaagcttcctttacgtacaataaaaacaaaatcaaaggtggggctaatcttcttataaaagaagacatgataattgacagaataaatgaaaactctattacagaaaaaactgatctgaccatgtccactgcagcttgtccaccttcctatgaccgggtgacaaagccaattgtggaaaaacatgagcaagaaggcaaagatgaaaaagccaaagggaaataaatgaaaataaataaaaataattgggtgacaaattgtttacagcctgtgaaggtgatgtatttttatcaacaggactcctttaggaggtcaatgccaaactgactgtttttacacaaatctccttaaggtcagtgcctacaataagacagtgaccccttgtcagcaaactgtgactctgtgtaaaggggagatgaccttgacaggaggttactgttctcactaccagctgacactgctgaagataagatgcacaatggctagtcagactgtagggaccagtttcaaggggtgcaaacctgtgattttggggttgtttaacatgaaacactttagtgtagtaattgtatccactgtttgcatttcaactgccacatttgtcacatttttatggaatctgttagtggattcatctttttgttaatccatgtgtttattatatgtgactatttttgtaaacgaagtttctgttgagaaataggctaaggacctctataacaggtatgccacctggggggtatggcaaccacatggccctcccagctacacaaagtcgtggtttgcatgagggcatgctgcacttagagatcatgcatgagaaaaagtcacaagaaaaacaaattcttaaatttcaccatatttctgggaggggtaattgggtgataagtggaggtgctttgttgatcttgttttgcgaaatccagcccctagaccaagtagattatttgtgggtaggccagtaaatcttagcaggtgcaaacttcattcaaatgtttggagtcataaatgttatgtttctttttgttgtattaaaaaaaaaacctgaatagtgaatattgcccctcaccctccaccgccagaagactgaattgaccaaaattactctttataaatttctgctttttcctgcactttgtttagccatcttcggctctcagcaaggttgacactgtatatgttaatgaaatgctatttattatgtaaatagtcattttaccctgtggtgcacgtttgagcaaacaaataatgacctaagcacagtatttattgcatcaaatatgtaccacaagaaatgtagagtgcaagctttacacaggtaataaaatgtattctgtaccatttatagatagtttggatgctatcaatgcatgtttatattaccatgctgctgtatctggtttctctcactgctcagaatctcatttatgagaaaccatatgtcagtggtaaagtcaaggaaattgttcaacagatctcatttatttaagtcattaagcaatagtttgcagcactttaacagctttttggttatttttacattttaagtggataacatatggtatatagccagactgtacagacatgtttaaaaaaacacactgcttaacctattaaatatgtgtttagaattttataagcaaatataaatactgtaaaaagtcactttattttatttttcagcattatgtacataaatatgaagaggaaattatcttcaggttgatatcacaatcacttttcttactttctgtccatagtactttttcatgaaagaaatttgctaaataagacatgaaaacaagactgggtagttgtagatttctgctttttaaattacatttgctaattttagattatttcacaattttaaggagcaaaataggttcacgattcatatccaaattatgctttgcaattggaaaagggtttaaaattttatttatatttctggtagtacctgcactaactgaattgaaggtagtgcttatgttatttttgttctttttttctgacttcggtttatgttttcatttctttggagtaatgctgctctagattgttctaaatagaatgtgggcttcataatttttttttccacaaaaacagagtagtcaacttatatagtcaattacatcaggacattttgtgtttcttacagaagcaaaccataggctcctcttttccttaaaactacttagataaactgtattcgtgaactgcatgctggaaaatgctactattatgctaaataatgctaaccaacatttaaaatgtgcaaaactaataaagattacattttttattttattgtttgcccagtcactttttgttaacagaatattctaatgatatggagattttttacattacaaattgggggagaaggggagcgcgcgcgcacacacacacacacacacacacacacacacacacacacagaggcatacccacgttgacaacaaaacctagggtagatatgtcactggaggtagggggtaatgacctcccagaattacaagcagcaggtgtgttctctgttaggaggaagaactggtgtcagaggatagctagtgattctaggaggaagagaagtatggaagccagagtgatggtggatgaccccttgagctatgaaaagaaacccttaaatcatcatttaaaaatttagaattgccatgtgtgtaggatactgtgtttgctcctccagagccactctctctgcttctgcatcattctgtgtgtcccagaagggtgacttctacacattgcaaaaatgggctctcctacctttgagctcccaattggtttggccaatgagaagcaccagtgggaaagcaccagagagagaagattgacataggaatatttcttctccaattccttctttgctgggttggcactggactcattcctccccgaaaagtcatactccaatcagactgcccctcatacaactgaagctactttctctggggtcaggtaatcactcctccccttgctccttcaggtctgctgctgcattgagagtgcttttgtattccttgtagctttctcctaacattgctgacacttttgtaaatgtccccttcatgaaattcttctatatgcctcatttcagcatgccatctgtctcctgcctggctgacacaaggtgattcaacagctcatgaaagtcagcaggaagcaaagatgtgccttgcttcagcttggggtcttaatcttgctaacttttgcagataaagaaaaacagtaactgggggaaccacagtgaagtccagtgcagaattcacagatatcatggaaaggttactcgggtggtccagatagtaaaattaacagtctaaattaatctatctaaatttctgaggaacgagaagccttcccttgtcatcaggtgaagccagaagagggaatatagcctcaaccagaaaagggacagtaattaaaaggcttttcccatccttgtacaatggactgactttgcctcttcataacatcacaatcctaaagcaacacaacaattaattctgatatattagtagctgaaaaaaattcccatttccaactaaggtaggtcagaattataggataaaccctgcagactttttatactacccatccacgccattactcactgttacctttccaaatacaaagagaagaactggtaaaacataatcatataaatctccatattcattttgaaatatttggcatgatattttctgtgctaaaaagtaattattcttcaaagaatgatgaggtcatgtcagtaagacacaggaaccaactagaaggggcttcccactggccaaatctggggcaagttgagcatcaaaataaatgatagtaaaagattataattcattgaataagaatcagcaaatacatactgatgtaagtaaataaggaaaagtacaaatctgtttcttgcagttgaatgttaattaacaattgtagaagaaataacggagttagaaaaatcactatttggcaatcaccctaatgacaattgattcatacaagaatcatcaatgagtattaaaactcatgggtgaaagtttgatgaggaatagggtatttatagcatcttaaagtatctcttctctattaagtagaaaatttaaacagaagaaagtatactttggagaaatacagcagacaataccttcaaagatatcatcaattatgagaccaactgatactatgtgcctcctgataagatatactgaaagggccacattacttcttggtacacagtcaaaattttaaaaccagaatctaactacaaggaaaatcaaattgaggacactctataaaataagtggactgaactccttaaaaatgtcaatgtcatgaaagacaaagaaaggctaaagaattccatgaggtcaaagaactatgacaactaaacacaattctggatggaatatcaaattaaaaaataacagataaataatattattgggaaagttgaataaatttgaatatggactgtttattagttattagtattataatagtgttaattttcctaattttgttaagactagtgtgcctgttccatgaaaatagaaaatgttcttattctctgaaaatgcatgctaaagtatttaggggtgaatgcaacaatgtctgcagctcattcttgaatcagttcaaagaaaaatgagttacatttatatatatatgtatgtatgtaaacagacatagataaaagtatagatgtgtgtgtgtctttagaaaggggaggattttttttttttttttgctgtgtgttactgaagtgcctatgtctgcgtgttcacactatcatattttgtatgccctggactttataatttctaccttcaaaattagatctactgttggtaattaattcaatatatactggttttttaactactattctcatttcctagcagtaatcttcctgaaaagtcacagaaatgattacattccttgttcttcataataatcactgtttaattaaaataagaatattttagaaaagatctgcggcatagtggttaagaccccagtatttgatgctaaacagatctgatttggataacagaaggtggcactttgctgtttaagctggggaccagacactgtgggtataaatagtaattccaaacacagctccacagagcagcacccttatgacaaggttttcatatgtctatagttaagccagaaaattaagaataatgccataaatatttataaagctgaacatatccaagttaaagacctttatcctgaaattgtatcttttagattattttctaaagactaataccatttaatgtttaaatgttctttggaaatgatggtgagaatacgtgataatgggtcattggttttaatattttatttagccaagtggaaaattggcaacctggtgtcggtcctcccatttgtattttactggtgcatgaaatccaaaagtctagtaaccattgggacagacaactctactgcataagtttgtatgtttgtatatctgtatcacaaagcccagacactcgaactatataaacttgtcgcactaaagacagcaaatatgtctggtaattgcatattcttcatgtgtgcactggaatttcttattatataagaaaataaatgtgtttctaaaccaccatgaattgggtactgctgatagtactattcttcctggcacatggaaatatcccactgaggttgtcaatcaatattgatttaatcagtgtggcagcaaaggcactagaggaggaaaatactctagacaatcaagtatagatgggaaaattgcatcaccaagaaattcttaaaatcacaagtggataatttgcaatatcaattgattttactcaactgcttgagtcctttatcattccgttagaacactcctcatatttgcagataactcagcccctcacctcagcaacaagcaagaggacatcattataaacttcctcaatttctttcctatccagtgaaaaatatctaagtcccttttcccttcccttttccttcccttcccttcctttttctttccttccattctcttcctttttccttcctttttctttccttccattctcttcctttttccttcctttttcttactttacctccccctcctacctttccctttctcccttcctccctctctcccttccttcctctctccctctccttccttccttccttcaatccatacttttatatcttttcagagatcaatttttcccattcatttctacattctcagataccttgctccatgacttgttctacttctcttctatctttattctttccctcttgactgatcctttttgtctgcctttgcattttcaaaatcagtttttctaatcttaaaaaataactttgctcaaccctgatgcatctttattcactgtgtcattatctcattatttttaaaggttagtttctaaagccagggctctatactcactaccttcactcttggttaaaattaaaagaaatataggtcccagtgatatttatgggaaaatttgactgtgaataatcttgttgatataaacactttgggttttcaaaatgttatgctagctgttaactttcccagtaacattatgagggaagggctggaaaatacaaaaggtagacataggaaccgagaacaccacccctatggagccaagctatacatactctgtctctggttatcataaatacatctcctatattcaatgcttgcttagaaaggcatgatgtccacggagcaattcaattgttcactgtgatgggtttttttgttttctcctcatggaatgcaacttttatttat

SEQ ID NO: 560 - DNA, 13008 bp, Homo sapiens
  source 1..13008: mol_type = genomic DNA
accatagagtgaggcgaggatgaagccgagaggatactgcagaggtctctggtgcatgtgtgtatgtgtgcgtttgtgtgtgtttgtgtgtctgtgtgttctgccccagtgagactgcagcccttgtaaatactttgacaccttttgcaagaaggaatctgaacaattgcaactgaaggcacattgttatcatctcgtctttgggtgatgctgttcctcactgcagatggataattttccttttaatcaggtttgggcaattatgaataaggctgctgtatacatccgtgtgcaggattttgtgtggacataagttttcaactcctttggttaaatcctaaggaatttcatatgcagaataaatggtaattaaaatgtgcaggatgacaagatggagcaaacagtgcttgtaccaccaggacctgacagcttcaacttcttcaccagagaatctcttgcggctattgaaagacgcattgcagaagaaaaggcaaagaatcccaaaccagacaaaaaagatgacgacgaaaatggcccaaagccaaatagtgacttggaagctggaaagaaccttccatttatttatggagacattcctccagagatggtgtcagagcccctggaggacctggacccctactatatcaataagaaaacttttatagtattgaataaagggaaggccatcttccggttcagtgccacctctgccctgtacattttaactcccttcaatcctcttaggaaaatagctattaagattttggtacattcattattcagcatgctaattatgtgcactattttgacaaactgtgtgtttatgacaatgagtaaccctcctgattggacaaagaatgtagaatacaccttcacaggaatatatacttttgaatcacttataaaaattattgcaaggggattctgtttagaagattttactttccttcgggatccatggaactggctcgatttcactgtcattacatttgcgtacgtcacagagtttgtggacctgggcaatgtctcggcattgagaacattcagagttctccgagcattgaagacgatttcagtcattccaggcctgaaaaccattgtgggagccctgatccagtctgtgaagaagctctcagatgtaatgatcctgactgtgttctgtctgagcgtatttgctctaattgggctgcagctgttcatgggcaacctgaggaataaatgtatacaatggcctcccaccaatgcttccttggaggaacatagtatagaaaagaatataactgtgaattataatggtacacttataaatgaaactgtctttgagtttgactggaagtcatatattcaagattcaagatatcattatttcctggagggttttttagatgcactactatgtggaaatagctctgatgcaggccaatgtccagagggatatatgtgtgtgaaagctggtagaaatcccaattatggctacacaagctttgataccttcagttgggcttttttgtccttgtttcgactaatgactcaggacttctgggaaaatctttatcaactgacattacgtgctgctgggaaaacgtacatgatattttttgtattggtcattttcttgggctcattctacctaataaatttgatcctggctgtggtggccatggcctacgaggaacagaatcaggccaccttggaagaagcagaacagaaagaggccgaatttcagcagatgattgaacagcttaaaaagcaacaggaggcagctcagcaggcagcaacggcaactgcctcagaacattccagagagcccagtgcagcaggcaggctctcagacagctcatctgaagcctctaagttgagttccaagagtgctaaggaaagaagaaatcggaggaagaaaagaaaacagaaagagcagtctggtggggaagagaaagatgaggatgaattccaaaaatctgaatctgaggacagcatcaggaggaaaggttttcgcttctccattgaagggaaccgattgacatatgaaaagaggtactcctccccacaccagtctttgttgagcatccgtggctccctattttcaccaaggcgaaatagcagaacaagccttttcagctttagagggcgagcaaaggatgtgggatctgagaacgacttcgcagatgatgagcacagcacctttgaggataacgagagccgtagagattccttgtttgtgccccgacgacacggagagagacgcaacagcaacctgagtcagaccagtaggtcatcccggatgctggcagtgtttccagcgaatgggaagatgcacagcactgtggattgcaatggtgtggtttccttggttggtggaccttcagttcctacatcgcctgttggacagcttctgccagagggaacaaccactgaaactgaaatgagaaagagaaggtcaagttctttccacgtttccatggactttctagaagatccttcccaaaggcaacgagcaatgagtatagccagcattctaacaaatacagtagaagaacttgaagaatccaggcagaaatgcccaccctgttggtataaattttccaacatattcttaatctgggactgttctccatattggttaaaagtgaaacatgttgtcaacctggttgtgatggacccatttgttgacctggccatcaccatctgtattgtcttaaatactcttttcatggccatggagcactatccaatgacggaccatttcaataatgtgcttacagtaggaaacttggtaagcatattggaaggttttcactgggatctttacagcagaaatgtttctgaaaattattgccatggatccttactattatttccaagaaggctggaatatctttgacggttttattgtgacgcttagcctggtagaacttggactcgccaatgtggaaggattatctgttctccgttcatttcgattgctgcgagttttcaagttggcaaaatcttggccaacgttaaatatgctaataaagatcatcggcaattccgtgggggctctgggaaatttaaccctcgtcttggccatcatcgtcttcatttttgccgtggtcggcatgcagctctttggtaaaagctacaaagattgtgtctgcaagatcgccagtgattgtcaactcccacgctggcacatgaatgacttcttccactccttcctgattgtgttccgcgtgctgtgtggggagtggatagagaccatgtgggactgtatggaggttgctggtcaagccatgtgccttactgtcttcatgatggtcatggtgattggaaacctagtggtcctgaatctctttctggccttgcttctgagctcatttagtgcagacaaccttgcagccactgatgatgataatgaaatgaataatctccaaattgctgtggataggatgcacaaaggagtagcttatgtgaaaagaaaaatatatgaatttattcaacagtccttcattaggaaacaaaagattttagatgaaattaaaccacttgatgatctaaacaacaagaaagacagttgtatgtccaatcatacagcagaaattgggaaagatcttgactatcttaaagatgtaaatggaactacaagtggtataggaactggcagcagtgttgaaaaatacattattgatgaaagtgattacatgtcattcataaacaaccccagtcttactgtgactgtaccaattgctgtaggagaatctgactttgaaaatttaaacacggaagactttagtagtgaatcggatctggaagaaagcaaagagaaactgaatgaaagcagtagctcatcagaaggtagcactgtggacatcggcgcacctgtagaagaacagcccgtagtggaacctgaagaaactcttgaaccagaagcttgtttcactgaaggctgtgtacaaagattcaagtgttgtcaaatcaatgtggaagaaggcagaggaaaacaatggtggaacctgagaaggacgtgtttccgaatagttgaacataactggtttgagaccttcattgttttcatgattctccttagtagtggtgctctggcatttgaagatatatatattgatcagcgaaagacgattaagacgatgttggaatatgctgacaaggttttcacttacattttcattctggaaatgcttctaaaatgggtggcatatggctatcaaacatatttcaccaatgcctggtgttggctggacttcttaattgttgatgtttcattggtcagtttaacagcaaatgccttgggttactcagaacttggagccatcaaatctctcaggacactaagagctctgagacctctaagagccttatctcgatttgaagggatgagggtggttgtgaatgcccttttaggagcaattccatccatcatgaatgtgcttctggtttgtcttatattctggctaattttcagcatcatgggcgtaaatttgtttgctggcaaattctaccactgtattaacaccacaactggtgacaggtttgacatcgaagacgtgaataatcatactgattgcctaaaactaatagaaagaaatgagactgctcgatggaaaaatgtgaaagtaaactttgataatgtaggatttgggtatctctctttgcttcaagttgccacattcaaaggatggatggatataatgtatgcagcagttgattccagaaatgtggaactccagcctaagtatgaagaaagtctgtacatgtatctttactttgttattttcatcatctttgggtccttcttcaccttgaacctgtttattggtgtcatcatagataatttcaaccagcagaaaaagaagtttggaggtcaagacatctttatgacagaagaacagaagaaatactataatgcaatgaaaaaattaggatcgaaaaaaccgcaaaagcctatacctcgaccaggaaacaaatttcaaggaatggtctttgacttcgtaaccagacaagtttttgacataagcatcatgattctcatctgtcttaacatggtcacaatgatggtggaaacagatgaccagagtgaatatgtgactaccattttgtcacgcatcaatctggtgttcattgtgctatttactggagagtgtgtactgaaactcatctctctacgccattattattttaccattggatggaatatttttgattttgtggttgtcattctctccattgtaggtatgtttcttgccgagctgatagaaaagtatttcgtgtcccctaccctgttccgagtgatccgtcttgctaggattggccgaatcctacgtctgatcaaaggagcaaaggggatccgcacgctgctctttgctttgatgatgtcccttcctgcgttgtttaacatcggcctcctactcttcctagtcatgttcatctacgccatctttgggatgtccaactttgcctatgttaagagggaagttgggatcgatgacatgttcaactttgagacctttggcaacagcatgatctgcctattccaaattacaacctctgctggctgggatggattgctagcacccattctcaacagtaagccacccgactgtgaccctaataaagttaaccctggaagctcagttaagggagactgtgggaacccatctgttggaattttcttttttgtcagttacatcatcatatccttcctggttgtggtgaacatgtacatcgcggtcatcctggagaacttcagtgttgctactgaagaaagtgcagagcctctgagtgaggatgactttgagatgttctatgaggtttgggagaagtttgatcccgatgcaactcagttcatggaatttgaaaaattatctcagtttgcagctgcgcttgaaccgcctctcaatctgccacaaccaaacaaactccagctcattgccatggatttgcccatggtgagtggtgaccggatccactgtcttgatatcttatttgcttttacaaagcgggttctaggagagagtggagagatggatgctctacgaatacagatggaagagcgattcatggcttccaatccttccaaggtctcctatcagccaatcactactactttaaaacgaaaacaagaggaagtatctgctgtcattattcagcgtgcttacagacgccaccttttaaagcgaactgtaaaacaagcttcctttacgtacaataaaaacaaaatcaaaggtggggctaatcttcttataaaagaagacatgataattgacagaataaatgaaaactctattacagaaaaaactgatctgaccatgtccactgcagcttgtccaccttcctatgaccgggtgacaaagccaattgtggaaaaacatgagcaagaaggcaaagatgaaaaagccaaagggaaataaatgaaaataaataaaaataattgggtgacaaattgtttacagcctgtgaaggtgatgtatttttatcaacaggactcctttaggaggtcaatgccaaactgactgtttttacacaaatctccttaaggtcagtgcctacaataagacagtgaccccttgtcagcaaactgtgactctgtgtaaaggggagatgaccttgacaggaggttactgttctcactaccagctgacactgctgaagataagatgcacaatggctagtcagactgtagggaccagtttcaaggggtgcaaacctgtgattttggggttgtttaacatgaaacactttagtgtagtaattgtatccactgtttgcatttcaactgccacatttgtcacatttttatggaatctgttagtggattcatctttttgttaatccatgtgtttattatatgtgactatttttgtaaacgaagtttctgttgagaaataggctaaggacctctataacaggtatgccacctggggggtatggcaaccacatggccctcccagctacacaaagtcgtggtttgcatgagggcatgctgcacttagagatcatgcatgagaaaaagtcacaagaaaaacaaattcttaaatttcaccatatttctgggaggggtaattgggtgataagtggaggtgctttgttgatcttgttttgcgaaatccagcccctagaccaagtagattatttgtgggtaggccagtaaatcttagcaggtgcaaacttcattcaaatgtttggagtcataaatgttatgtttctttttgttgtattaaaaaaaaaacctgaatagtgaatattgcccctcaccctccaccgccagaagactgaattgaccaaaattactctttataaatttctgctttttcctgcactttgtttagccatcttcggctctcagcaaggttgacactgtatatgttaatgaaatgctatttattatgtaaatagtcattttaccctgtggtgcacgtttgagcaaacaaataatgacctaagcacagtatttattgcatcaaatatgtaccacaagaaatgtagagtgcaagctttacacaggtaataaaatgtattctgtaccatttatagatagtttggatgctatcaatgcatgtttatattaccatgctgctgtatctggtttctctcactgctcagaatctcatttatgagaaaccatatgtcagtggtaaagtcaaggaaattgttcaacagatctcatttatttaagtcattaagcaatagtttgcagcactttaacagctttttggttatttttacattttaagtggataacatatggtatatagccagactgtacagacatgtttaaaaaaacacactgcttaacctattaaatatgtgtttagaattttataagcaaatataaatactgtaaaaagtcactttattttatttttcagcattatgtacataaatatgaagaggaaattatcttcaggttgatatcacaatcacttttcttactttctgtccatagtactttttcatgaaagaaatttgctaaataagacatgaaaacaagactgggtagttgtagatttctgctttttaaattacatttgctaattttagattatttcacaattttaaggagcaaaataggttcacgattcatatccaaattatgctttgcaattggaaaagggtttaaaattttatttatatttctggtagtacctgcactaactgaattgaaggtagtgcttatgttatttttgttctttttttctgacttcggtttatgttttcatttctttggagtaatgctgctctagattgttctaaatagaatgtgggcttcataatttttttttccacaaaaacagagtagtcaacttatatagtcaattacatcaggacattttgtgtttcttacagaagcaaaccataggctcctcttttccttaaaactacttagataaactgtattcgtgaactgcatgctggaaaatgctactattatgctaaataatgctaaccaacatttaaaatgtgcaaaactaataaagattacattttttattttattgtttgcccagtcactttttgttaacagaatattctaatgatatggagattttttacattacaaattgggggagaaggggagcgcgcgcgcacacacacacacacacacacacacacacacacacacacagaggcatacccacgttgacaacaaaacctagggtagatatgtcactggaggtagggggtaatgacctcccagaattacaagcagcaggtgtgttctctgttaggaggaagaactggtgtcagaggatagctagtgattctaggaggaagagaagtatggaagccagagtgatggtggatgaccccttgagctatgaaaagaaacccttaaatcatcatttaaaaatttagaattgccatgtgtgtaggatactgtgtttgctcctccagagccactctctctgcttctgcatcattctgtgtgtcccagaagggtgacttctacacattgcaaaaatgggctctcctacctttgagctcccaattggtttggccaatgagaagcaccagtgggaaagcaccagagagagaagattgacataggaatatttcttctccaattccttctttgctgggttggcactggactcattcctccccgaaaagtcatactccaatcagactgcccctcatacaactgaagctactttctctggggtcaggtaatcactcctccccttgctccttcaggtctgctgctgcattgagagtgcttttgtattccttgtagctttctcctaacattgctgacacttttgtaaatgtccccttcatgaaattcttctatatgcctcatttcagcatgccatctgtctcctgcctggctgacacaaggtgattcaacagctcatgaaagtcagcaggaagcaaagatgtgccttgcttcagcttggggtcttaatcttgctaacttttgcagataaagaaaaacagtaactgggggaaccacagtgaagtccagtgcagaattcacagatatcatggaaaggttactcgggtggtccagatagtaaaattaacagtctaaattaatctatctaaatttctgaggaacgagaagccttcccttgtcatcaggtgaagccagaagagggaatatagcctcaaccagaaaagggacagtaattaaaaggcttttcccatccttgtacaatggactgactttgcctcttcataacatcacaatcctaaagcaacacaacaattaattctgatatattagtagctgaaaaaaattcccatttccaactaaggtaggtcagaattataggataaaccctgcagactttttatactacccatccacgccattactcactgttacctttccaaatacaaagagaagaactggtaaaacataatcatataaatctccatattcattttgaaatatttggcatgatattttctgtgctaaaaagtaattattcttcaaagaatgatgaggtcatgtcagtaagacacaggaaccaactagaaggggcttcccactggccaaatctggggcaagttgagcatcaaaataaatgatagtaaaagattataattcattgaataagaatcagcaaatacatactgatgtaagtaaataaggaaaagtacaaatctgtttcttgcagttgaatgttaattaacaattgtagaagaaataacggagttagaaaaatcactatttggcaatcaccctaatgacaattgattcatacaagaatcatcaatgagtattaaaactcatgggtgaaagtttgatgaggaatagggtatttatagcatcttaaagtatctcttctctattaagtagaaaatttaaacagaagaaagtatactttggagaaatacagcagacaataccttcaaagatatcatcaattatgagaccaactgatactatgtgcctcctgataagatatactgaaagggccacattacttcttggtacacagtcaaaattttaaaaccagaatctaactacaaggaaaatcaaattgaggacactctataaaataagtggactgaactccttaaaaatgtcaatgtcatgaaagacaaagaaaggctaaagaattccatgaggtcaaagaactatgacaactaaacacaattctggatggaatatcaaattaaaaaataacagataaataatattattgggaaagttgaataaatttgaatatggactgtttattagttattagtattataatagtgttaattttcctaattttgttaagactagtgtgcctgttccatgaaaatagaaaatgttcttattctctgaaaatgcatgctaaagtatttaggggtgaatgcaacaatgtctgcagctcattcttgaatcagttcaaagaaaaatgagttacatttatatatatatgtatgtatgtaaacagacatagataaaagtatagatgtgtgtgtgtctttagaaaggggaggattttttttttttttttgctgtgtgttactgaagtgcctatgtctgcgtgttcacactatcatattttgtatgccctggactttataatttctaccttcaaaattagatctactgttggtaattaattcaatatatactggttttttaactactattctcatttcctagcagtaatcttcctgaaaagtcacagaaatgattacattccttgttcttcataataatcactgtttaattaaaataagaatattttagaaaagatctgcggcatagtggttaagaccccagtatttgatgctaaacagatctgatttggataacagaaggtggcactttgctgtttaagctggggaccagacactgtgggtataaatagtaattccaaacacagctccacagagcagcacccttatgacaaggttttcatatgtctatagttaagccagaaaattaagaataatgccataaatatttataaagctgaacatatccaagttaaagacctttatcctgaaattgtatcttttagattattttctaaagactaataccatttaatgtttaaatgttctttggaaatgatggtgagaatacgtgataatgggtcattggttttaatattttatttagccaagtggaaaattggcaacctggtgtcggtcctcccatttgtattttactggtgcatgaaatccaaaagtctagtaaccattgggacagacaactctactgcataagtttgtatgtttgtatatctgtatcacaaagcccagacactcgaactatataaacttgtcgcactaaagacagcaaatatgtctggtaattgcatattcttcatgtgtgcactggaatttcttattatataagaaaataaatgtgtttctaaaccaccatgaattgggtactgctgatagtactattcttcctggcacatggaaatatcccactgaggttgtcaatcaatattgatttaatcagtgtggcagcaaaggcactagaggaggaaaatactctagacaatcaagtatagatgggaaaattgcatcaccaagaaattcttaaaatcacaagtggataatttgcaatatcaattgattttactcaactgcttgagtcctttatcattccgttagaacactcctcatatttgcagataactcagcccctcacctcagcaacaagcaagaggacatcattataaacttcctcaatttctttcctatccagtgaaaaatatctaagtcccttttcccttcccttttccttcccttcccttcctttttctttccttccattctcttcctttttccttcctttttctttccttccattctcttcctttttccttcctttttcttactttacctccccctcctacctttccctttctcccttcctccctctctcccttccttcctctctccctctccttccttccttccttcaatccatacttttatatcttttcagagatcaatttttcccattcatttctacattctcagataccttgctccatgacttgttctacttctcttctatctttattctttccctcttgactgatcctttttgtctgcctttgcattttcaaaatcagtttttctaatcttaaaaaataactttgctcaaccctgatgcatctttattcactgtgtcattatctcattatttttaaaggttagtttctaaagccagggctctatactcactaccttcactcttggttaaaattaaaagaaatataggtcccagtgatatttatgggaaaatttgactgtgaataatcttgttgatataaacactttgggttttcaaaatgttatgctagctgttaactttcccagtaacattatgagggaagggctggaaaatacaaaaggtagacataggaaccgagaacaccacccctatggagccaagctatacatactctgtctctggttatcataaatacatctcctatattcaatgcttgcttagaaaggcatgatgtccacggagcaattcaattgttcactgtgatgggtttttttgttttctcctcatggaatgcaacttttatttat

SEQ ID NO: 561 - DNA, 13079 bp, Homo sapiens
  source 1..13079: mol_type = genomic DNA
accatagagtgaggcgaggatgaagccgagaggatactgcagaggtctctggtgcatgtgtgtatgtgtgcgtttgtgtgtgtttgtgtgtctgtgtgttctgccccagtgagactgcagcccttgtaaatactttgacaccttttgcaagaaggaatctgaacaattgcaactgaaggcacattgttatcatctcgtctttgggtgatgctgttcctcactgcagatggataattttccttttaatcagaacagcataagaattatttctgagtggaggtgaggcttgtccaaatgtctttgctatcatggatttcctgactcctacctgtttgaggtttgggcaattatgaataaggctgctgtatacatccgtgtgcaggattttgtgtggacataagttttcaactcctttggttaaatcctaaggaatttcatatgcagaataaatggtaattaaaatgtgcaggatgacaagatggagcaaacagtgcttgtaccaccaggacctgacagcttcaacttcttcaccagagaatctcttgcggctattgaaagacgcattgcagaagaaaaggcaaagaatcccaaaccagacaaaaaagatgacgacgaaaatggcccaaagccaaatagtgacttggaagctggaaagaaccttccatttatttatggagacattcctccagagatggtgtcagagcccctggaggacctggacccctactatatcaataagaaaacttttatagtattgaataaagggaaggccatcttccggttcagtgccacctctgccctgtacattttaactcccttcaatcctcttaggaaaatagctattaagattttggtacattcattattcagcatgctaattatgtgcactattttgacaaactgtgtgtttatgacaatgagtaaccctcctgattggacaaagaatgtagaatacaccttcacaggaatatatacttttgaatcacttataaaaattattgcaaggggattctgtttagaagattttactttccttcgggatccatggaactggctcgatttcactgtcattacatttgcgtacgtcacagagtttgtggacctgggcaatgtctcggcattgagaacattcagagttctccgagcattgaagacgatttcagtcattccaggcctgaaaaccattgtgggagccctgatccagtctgtgaagaagctctcagatgtaatgatcctgactgtgttctgtctgagcgtatttgctctaattgggctgcagctgttcatgggcaacctgaggaataaatgtatacaatggcctcccaccaatgcttccttggaggaacatagtatagaaaagaatataactgtgaattataatggtacacttataaatgaaactgtctttgagtttgactggaagtcatatattcaagattcaagatatcattatttcctggagggttttttagatgcactactatgtggaaatagctctgatgcaggccaatgtccagagggatatatgtgtgtgaaagctggtagaaatcccaattatggctacacaagctttgataccttcagttgggcttttttgtccttgtttcgactaatgactcaggacttctgggaaaatctttatcaactgacattacgtgctgctgggaaaacgtacatgatattttttgtattggtcattttcttgggctcattctacctaataaatttgatcctggctgtggtggccatggcctacgaggaacagaatcaggccaccttggaagaagcagaacagaaagaggccgaatttcagcagatgattgaacagcttaaaaagcaacaggaggcagctcagcaggcagcaacggcaactgcctcagaacattccagagagcccagtgcagcaggcaggctctcagacagctcatctgaagcctctaagttgagttccaagagtgctaaggaaagaagaaatcggaggaagaaaagaaaacagaaagagcagtctggtggggaagagaaagatgaggatgaattccaaaaatctgaatctgaggacagcatcaggaggaaaggttttcgcttctccattgaagggaaccgattgacatatgaaaagaggtactcctccccacaccagtctttgttgagcatccgtggctccctattttcaccaaggcgaaatagcagaacaagccttttcagctttagagggcgagcaaaggatgtgggatctgagaacgacttcgcagatgatgagcacagcacctttgaggataacgagagccgtagagattccttgtttgtgccccgacgacacggagagagacgcaacagcaacctgagtcagaccagtaggtcatcccggatgctggcagtgtttccagcgaatgggaagatgcacagcactgtggattgcaatggtgtggtttccttggttggtggaccttcagttcctacatcgcctgttggacagcttctgccagagggaacaaccactgaaactgaaatgagaaagagaaggtcaagttctttccacgtttccatggactttctagaagatccttcccaaaggcaacgagcaatgagtatagccagcattctaacaaatacagtagaagaacttgaagaatccaggcagaaatgcccaccctgttggtataaattttccaacatattcttaatctgggactgttctccatattggttaaaagtgaaacatgttgtcaacctggttgtgatggacccatttgttgacctggccatcaccatctgtattgtcttaaatactcttttcatggccatggagcactatccaatgacggaccatttcaataatgtgcttacagtaggaaacttggttttcactgggatctttacagcagaaatgtttctgaaaattattgccatggatccttactattatttccaagaaggctggaatatctttgacggttttattgtgacgcttagcctggtagaacttggactcgccaatgtggaaggattatctgttctccgttcatttcgattgctgcgagttttcaagttggcaaaatcttggccaacgttaaatatgctaataaagatcatcggcaattccgtgggggctctgggaaatttaaccctcgtcttggccatcatcgtcttcatttttgccgtggtcggcatgcagctctttggtaaaagctacaaagattgtgtctgcaagatcgccagtgattgtcaactcccacgctggcacatgaatgacttcttccactccttcctgattgtgttccgcgtgctgtgtggggagtggatagagaccatgtgggactgtatggaggttgctggtcaagccatgtgccttactgtcttcatgatggtcatggtgattggaaacctagtggtcctgaatctctttctggccttgcttctgagctcatttagtgcagacaaccttgcagccactgatgatgataatgaaatgaataatctccaaattgctgtggataggatgcacaaaggagtagcttatgtgaaaagaaaaatatatgaatttattcaacagtccttcattaggaaacaaaagattttagatgaaattaaaccacttgatgatctaaacaacaagaaagacagttgtatgtccaatcatacagcagaaattgggaaagatcttgactatcttaaagatgtaaatggaactacaagtggtataggaactggcagcagtgttgaaaaatacattattgatgaaagtgattacatgtcattcataaacaaccccagtcttactgtgactgtaccaattgctgtaggagaatctgactttgaaaatttaaacacggaagactttagtagtgaatcggatctggaagaaagcaaagagaaactgaatgaaagcagtagctcatcagaaggtagcactgtggacatcggcgcacctgtagaagaacagcccgtagtggaacctgaagaaactcttgaaccagaagcttgtttcactgaaggctgtgtacaaagattcaagtgttgtcaaatcaatgtggaagaaggcagaggaaaacaatggtggaacctgagaaggacgtgtttccgaatagttgaacataactggtttgagaccttcattgttttcatgattctccttagtagtggtgctctggcatttgaagatatatatattgatcagcgaaagacgattaagacgatgttggaatatgctgacaaggttttcacttacattttcattctggaaatgcttctaaaatgggtggcatatggctatcaaacatatttcaccaatgcctggtgttggctggacttcttaattgttgatgtttcattggtcagtttaacagcaaatgccttgggttactcagaacttggagccatcaaatctctcaggacactaagagctctgagacctctaagagccttatctcgatttgaagggatgagggtggttgtgaatgcccttttaggagcaattccatccatcatgaatgtgcttctggtttgtcttatattctggctaattttcagcatcatgggcgtaaatttgtttgctggcaaattctaccactgtattaacaccacaactggtgacaggtttgacatcgaagacgtgaataatcatactgattgcctaaaactaatagaaagaaatgagactgctcgatggaaaaatgtgaaagtaaactttgataatgtaggatttgggtatctctctttgcttcaagttgccacattcaaaggatggatggatataatgtatgcagcagttgattccagaaatgtggaactccagcctaagtatgaagaaagtctgtacatgtatctttactttgttattttcatcatctttgggtccttcttcaccttgaacctgtttattggtgtcatcatagataatttcaaccagcagaaaaagaagtttggaggtcaagacatctttatgacagaagaacagaagaaatactataatgcaatgaaaaaattaggatcgaaaaaaccgcaaaagcctatacctcgaccaggaaacaaatttcaaggaatggtctttgacttcgtaaccagacaagtttttgacataagcatcatgattctcatctgtcttaacatggtcacaatgatggtggaaacagatgaccagagtgaatatgtgactaccattttgtcacgcatcaatctggtgttcattgtgctatttactggagagtgtgtactgaaactcatctctctacgccattattattttaccattggatggaatatttttgattttgtggttgtcattctctccattgtaggtatgtttcttgccgagctgatagaaaagtatttcgtgtcccctaccctgttccgagtgatccgtcttgctaggattggccgaatcctacgtctgatcaaaggagcaaaggggatccgcacgctgctctttgctttgatgatgtcccttcctgcgttgtttaacatcggcctcctactcttcctagtcatgttcatctacgccatctttgggatgtccaactttgcctatgttaagagggaagttgggatcgatgacatgttcaactttgagacctttggcaacagcatgatctgcctattccaaattacaacctctgctggctgggatggattgctagcacccattctcaacagtaagccacccgactgtgaccctaataaagttaaccctggaagctcagttaagggagactgtgggaacccatctgttggaattttcttttttgtcagttacatcatcatatccttcctggttgtggtgaacatgtacatcgcggtcatcctggagaacttcagtgttgctactgaagaaagtgcagagcctctgagtgaggatgactttgagatgttctatgaggtttgggagaagtttgatcccgatgcaactcagttcatggaatttgaaaaattatctcagtttgcagctgcgcttgaaccgcctctcaatctgccacaaccaaacaaactccagctcattgccatggatttgcccatggtgagtggtgaccggatccactgtcttgatatcttatttgcttttacaaagcgggttctaggagagagtggagagatggatgctctacgaatacagatggaagagcgattcatggcttccaatccttccaaggtctcctatcagccaatcactactactttaaaacgaaaacaagaggaagtatctgctgtcattattcagcgtgcttacagacgccaccttttaaagcgaactgtaaaacaagcttcctttacgtacaataaaaacaaaatcaaaggtggggctaatcttcttataaaagaagacatgataattgacagaataaatgaaaactctattacagaaaaaactgatctgaccatgtccactgcagcttgtccaccttcctatgaccgggtgacaaagccaattgtggaaaaacatgagcaagaaggcaaagatgaaaaagccaaagggaaataaatgaaaataaataaaaataattgggtgacaaattgtttacagcctgtgaaggtgatgtatttttatcaacaggactcctttaggaggtcaatgccaaactgactgtttttacacaaatctccttaaggtcagtgcctacaataagacagtgaccccttgtcagcaaactgtgactctgtgtaaaggggagatgaccttgacaggaggttactgttctcactaccagctgacactgctgaagataagatgcacaatggctagtcagactgtagggaccagtttcaaggggtgcaaacctgtgattttggggttgtttaacatgaaacactttagtgtagtaattgtatccactgtttgcatttcaactgccacatttgtcacatttttatggaatctgttagtggattcatctttttgttaatccatgtgtttattatatgtgactatttttgtaaacgaagtttctgttgagaaataggctaaggacctctataacaggtatgccacctggggggtatggcaaccacatggccctcccagctacacaaagtcgtggtttgcatgagggcatgctgcacttagagatcatgcatgagaaaaagtcacaagaaaaacaaattcttaaatttcaccatatttctgggaggggtaattgggtgataagtggaggtgctttgttgatcttgttttgcgaaatccagcccctagaccaagtagattatttgtgggtaggccagtaaatcttagcaggtgcaaacttcattcaaatgtttggagtcataaatgttatgtttctttttgttgtattaaaaaaaaaacctgaatagtgaatattgcccctcaccctccaccgccagaagactgaattgaccaaaattactctttataaatttctgctttttcctgcactttgtttagccatcttcggctctcagcaaggttgacactgtatatgttaatgaaatgctatttattatgtaaatagtcattttaccctgtggtgcacgtttgagcaaacaaataatgacctaagcacagtatttattgcatcaaatatgtaccacaagaaatgtagagtgcaagctttacacaggtaataaaatgtattctgtaccatttatagatagtttggatgctatcaatgcatgtttatattaccatgctgctgtatctggtttctctcactgctcagaatctcatttatgagaaaccatatgtcagtggtaaagtcaaggaaattgttcaacagatctcatttatttaagtcattaagcaatagtttgcagcactttaacagctttttggttatttttacattttaagtggataacatatggtatatagccagactgtacagacatgtttaaaaaaacacactgcttaacctattaaatatgtgtttagaattttataagcaaatataaatactgtaaaaagtcactttattttatttttcagcattatgtacataaatatgaagaggaaattatcttcaggttgatatcacaatcacttttcttactttctgtccatagtactttttcatgaaagaaatttgctaaataagacatgaaaacaagactgggtagttgtagatttctgctttttaaattacatttgctaattttagattatttcacaattttaaggagcaaaataggttcacgattcatatccaaattatgctttgcaattggaaaagggtttaaaattttatttatatttctggtagtacctgcactaactgaattgaaggtagtgcttatgttatttttgttctttttttctgacttcggtttatgttttcatttctttggagtaatgctgctctagattgttctaaatagaatgtgggcttcataatttttttttccacaaaaacagagtagtcaacttatatagtcaattacatcaggacattttgtgtttcttacagaagcaaaccataggctcctcttttccttaaaactacttagataaactgtattcgtgaactgcatgctggaaaatgctactattatgctaaataatgctaaccaacatttaaaatgtgcaaaactaataaagattacattttttattttattgtttgcccagtcactttttgttaacagaatattctaatgatatggagattttttacattacaaattgggggagaaggggagcgcgcgcgcacacacacacacacacacacacacacacacacacacacagaggcatacccacgttgacaacaaaacctagggtagatatgtcactggaggtagggggtaatgacctcccagaattacaagcagcaggtgtgttctctgttaggaggaagaactggtgtcagaggatagctagtgattctaggaggaagagaagtatggaagccagagtgatggtggatgaccccttgagctatgaaaagaaacccttaaatcatcatttaaaaatttagaattgccatgtgtgtaggatactgtgtttgctcctccagagccactctctctgcttctgcatcattctgtgtgtcccagaagggtgacttctacacattgcaaaaatgggctctcctacctttgagctcccaattggtttggccaatgagaagcaccagtgggaaagcaccagagagagaagattgacataggaatatttcttctccaattccttctttgctgggttggcactggactcattcctccccgaaaagtcatactccaatcagactgcccctcatacaactgaagctactttctctggggtcaggtaatcactcctccccttgctccttcaggtctgctgctgcattgagagtgcttttgtattccttgtagctttctcctaacattgctgacacttttgtaaatgtccccttcatgaaattcttctatatgcctcatttcagcatgccatctgtctcctgcctggctgacacaaggtgattcaacagctcatgaaagtcagcaggaagcaaagatgtgccttgcttcagcttggggtcttaatcttgctaacttttgcagataaagaaaaacagtaactgggggaaccacagtgaagtccagtgcagaattcacagatatcatggaaaggttactcgggtggtccagatagtaaaattaacagtctaaattaatctatctaaatttctgaggaacgagaagccttcccttgtcatcaggtgaagccagaagagggaatatagcctcaaccagaaaagggacagtaattaaaaggcttttcccatccttgtacaatggactgactttgcctcttcataacatcacaatcctaaagcaacacaacaattaattctgatatattagtagctgaaaaaaattcccatttccaactaaggtaggtcagaattataggataaaccctgcagactttttatactacccatccacgccattactcactgttacctttccaaatacaaagagaagaactggtaaaacataatcatataaatctccatattcattttgaaatatttggcatgatattttctgtgctaaaaagtaattattcttcaaagaatgatgaggtcatgtcagtaagacacaggaaccaactagaaggggcttcccactggccaaatctggggcaagttgagcatcaaaataaatgatagtaaaagattataattcattgaataagaatcagcaaatacatactgatgtaagtaaataaggaaaagtacaaatctgtttcttgcagttgaatgttaattaacaattgtagaagaaataacggagttagaaaaatcactatttggcaatcaccctaatgacaattgattcatacaagaatcatcaatgagtattaaaactcatgggtgaaagtttgatgaggaatagggtatttatagcatcttaaagtatctcttctctattaagtagaaaatttaaacagaagaaagtatactttggagaaatacagcagacaataccttcaaagatatcatcaattatgagaccaactgatactatgtgcctcctgataagatatactgaaagggccacattacttcttggtacacagtcaaaattttaaaaccagaatctaactacaaggaaaatcaaattgaggacactctataaaataagtggactgaactccttaaaaatgtcaatgtcatgaaagacaaagaaaggctaaagaattccatgaggtcaaagaactatgacaactaaacacaattctggatggaatatcaaattaaaaaataacagataaataatattattgggaaagttgaataaatttgaatatggactgtttattagttattagtattataatagtgttaattttcctaattttgttaagactagtgtgcctgttccatgaaaatagaaaatgttcttattctctgaaaatgcatgctaaagtatttaggggtgaatgcaacaatgtctgcagctcattcttgaatcagttcaaagaaaaatgagttacatttatatatatatgtatgtatgtaaacagacatagataaaagtatagatgtgtgtgtgtctttagaaaggggaggattttttttttttttttgctgtgtgttactgaagtgcctatgtctgcgtgttcacactatcatattttgtatgccctggactttataatttctaccttcaaaattagatctactgttggtaattaattcaatatatactggttttttaactactattctcatttcctagcagtaatcttcctgaaaagtcacagaaatgattacattccttgttcttcataataatcactgtttaattaaaataagaatattttagaaaagatctgcggcatagtggttaagaccccagtatttgatgctaaacagatctgatttggataacagaaggtggcactttgctgtttaagctggggaccagacactgtgggtataaatagtaattccaaacacagctccacagagcagcacccttatgacaaggttttcatatgtctatagttaagccagaaaattaagaataatgccataaatatttataaagctgaacatatccaagttaaagacctttatcctgaaattgtatcttttagattattttctaaagactaataccatttaatgtttaaatgttctttggaaatgatggtgagaatacgtgataatgggtcattggttttaatattttatttagccaagtggaaaattggcaacctggtgtcggtcctcccatttgtattttactggtgcatgaaatccaaaagtctagtaaccattgggacagacaactctactgcataagtttgtatgtttgtatatctgtatcacaaagcccagacactcgaactatataaacttgtcgcactaaagacagcaaatatgtctggtaattgcatattcttcatgtgtgcactggaatttcttattatataagaaaataaatgtgtttctaaaccaccatgaattgggtactgctgatagtactattcttcctggcacatggaaatatcccactgaggttgtcaatcaatattgatttaatcagtgtggcagcaaaggcactagaggaggaaaatactctagacaatcaagtatagatgggaaaattgcatcaccaagaaattcttaaaatcacaagtggataatttgcaatatcaattgattttactcaactgcttgagtcctttatcattccgttagaacactcctcatatttgcagataactcagcccctcacctcagcaacaagcaagaggacatcattataaacttcctcaatttctttcctatccagtgaaaaatatctaagtcccttttcccttcccttttccttcccttcccttcctttttctttccttccattctcttcctttttccttcctttttctttccttccattctcttcctttttccttcctttttcttactttacctccccctcctacctttccctttctcccttcctccctctctcccttccttcctctctccctctccttccttccttccttcaatccatacttttatatcttttcagagatcaatttttcccattcatttctacattctcagataccttgctccatgacttgttctacttctcttctatctttattctttccctcttgactgatcctttttgtctgcctttgcattttcaaaatcagtttttctaatcttaaaaaataactttgctcaaccctgatgcatctttattcactgtgtcattatctcattatttttaaaggttagtttctaaagccagggctctatactcactaccttcactcttggttaaaattaaaagaaatataggtcccagtgatatttatgggaaaatttgactgtgaataatcttgttgatataaacactttgggttttcaaaatgttatgctagctgttaactttcccagtaacattatgagggaagggctggaaaatacaaaaggtagacataggaaccgagaacaccacccctatggagccaagctatacatactctgtctctggttatcataaatacatctcctatattcaatgcttgcttagaaaggcatgatgtccacggagcaattcaattgttcactgtgatgggtttttttgttttctcctcatggaatgcaacttttatttat

SEQ ID NO: 562 - DNA, 11940 bp, Homo sapiens
  source 1..11940: mol_type = genomic DNA
accatagagtgaggcgaggatgaagccgagaggatactgcagaggtctctggtgcatgtgtgtatgtgtgcgtttgtgtgtgtttgtgtgtctgtgtgttctgccccagtgagactgcagcccttgtaaatactttgacaccttttgcaagaaggaatctgaacaattgcaactgaaggcacattgttatcatctcgtctttgggtgatgctgttcctcactgcagatggataattttccttttaatcagaacagcataagaattatttctgagtggaggtgaggcttgtccaaatgtctttgctatcatggatttcctgactcctacctgtttgaggtttgggcaattatgaataaggctgctgtatacatccgtgtgcaggattttgtgtggacataagttttcaactcctttggttaaatcctaaggaatttcatatgcagaataaatggtaattaaaatgtgcaggatgacaagatggagcaaacagtgcttgtaccaccaggacctgacagcttcaacttcttcaccagagaatctcttgcggctattgaaagacgcattgcagaagaaaaggcaaagaatcccaaaccagacaaaaaagatgacgacgaaaatggcccaaagccaaatagtgacttggaagctggaaagaaccttccatttatttatggagacattcctccagagatggtgtcagagcccctggaggacctggacccctactatatcaataagaaaacttttatagtattgaataaagggaaggccatcttccggttcagtgccacctctgccctgtacattttaactcccttcaatcctcttaggaaaatagctattaagattttggtacattcattattcagcatgctaattatgtgcactattttgacaaactgtgtgtttatgacaatgagtaaccctcctgattggacaaagaatgtagaatacaccttcacaggaatatatacttttgaatcacttataaaaattattgcaaggggattctgtttagaagattttactttccttcgggatccatggaactggctcgatttcactgtcattacatttgcgtacgtcacagagtttgtggacctgggcaatgtctcggcattgagaacattcagagttctccgagcattgaagacgatttcagtcattccaggcctgaaaaccattgtgggagccctgatccagtctgtgaagaagctctcagatgtaatgatcctgactgtgttctgtctgagcgtatttgctctaattgggctgcagctgttcatgggcaacctgaggaataaatgtatacaatggcctcccaccaatgcttccttggaggaacatagtatagaaaagaatataactgtgaattataatggtacacttataaatgaaactgtctttgagtttgactggaagtcatatattcaagattcaagatatcattatttcctggagggttttttagatgcactactatgtggaaatagctctgatgcaggccaatgtccagagggatatatgtgtgtgaaagctggtagaaatcccaattatggctacacaagctttgataccttcagttgggcttttttgtccttgtttcgactaatgactcaggacttctgggaaaatctttatcaactgacattacgtgctgctgggaaaacgtacatgatattttttgtattggtcattttcttgggctcattctacctaataaatttgatcctggctgtggtggccatggcctacgaggaacagaatcaggccaccttggaagaagcagaacagaaagaggccgaatttcagcagatgattgaacagcttaaaaagcaacaggaggcagctcagcaggcagcaacggcaactgcctcagaacattccagagagcccagtgcagcaggcaggctctcagacagctcatctgaagcctctaagttgagttccaagagtgctaaggaaagaagaaatcggaggaagaaaagaaaacagaaagagcagtctggtggggaagagaaagatgaggatgaattccaaaaatctgaatctgaggacagcatcaggaggaaaggttttcgcttctccattgaagggaaccgattgacatatgaaaagaggtactcctccccacaccagtctttgttgagcatccgtggctccctattttcaccaaggcgaaatagcagaacaagccttttcagctttagagggcgagcaaaggatgtgggatctgagaacgacttcgcagatgatgagcacagcacctttgaggataacgagagccgtagagattccttgtttgtgccccgacgacacggagagagacgcaacagcaacctgagtcagaccagtaggtcatcccggatgctggcagtgtttccagcgaatgggaagatgcacagcactgtggattgcaatggtgtggtttccttggttggtggaccttcagttcctacatcgcctgttggacagcttctgccagaggtgataatagataagccagctactgatgacaatggaacaaccactgaaactgaaatgagaaagagaaggtcaagttctttccacgtttccatggactttctagaagatccttcccaaaggcaacgagcaatgagtatagccagcattctaacaaatacagtagaagaacttgaagaatccaggcagaaatgcccaccctgttggtataaattttccaacatattcttaatctgggactgttctccatattggttaaaagtgaaacatgttgtcaacctggttgtgatggacccatttgttgacctggccatcaccatctgtattgtcttaaatactcttttcatggccatggagcactatccaatgacggaccatttcaataatgtgcttacagtaggaaacttggttttcactgggatctttacagcagaaatgtttctgaaaattattgccatggatccttactattatttccaagaaggctggaatatctttgacggttttattgtgacgcttagcctggtagaacttggactcgccaatgtggaaggattatctgttctccgttcatttcgattgctgcgagttttcaagttggcaaaatcttggccaacgttaaatatgctaataaagatcatcggcaattccgtgggggctctgggaaatttaaccctcgtcttggccatcatcgtcttcatttttgccgtggtcggcatgcagctctttggtaaaagctacaaagattgtgtctgcaagatcgccagtgattgtcaactcccacgctggcacatgaatgacttcttccactccttcctgattgtgttccgcgtgctgtgtggggagtggatagagaccatgtgggactgtatggaggttgctggtcaagccatgtgccttactgtcttcatgatggtcatggtgattggaaacctagtggtcctgaatctctttctggccttgcttctgagctcatttagtgcagacaaccttgcagccactgatgatgataatgaaatgaataatctccaaattgctgtggataggatgcacaaaggagtagcttatgtgaaaagaaaaatatatgaatttattcaacagtccttcattaggaaacaaaagattttagatgaaattaaaccacttgatgatctaaacaacaagaaagacagttgtatgtccaatcatacagcagaaattgggaaagatcttgactatcttaaagatgtaaatggaactacaagtggtataggaactggcagcagtgttgaaaaatacattattgatgaaagtgattacatgtcattcataaacaaccccagtcttactgtgactgtaccaattgctgtaggagaatctgactttgaaaatttaaacacggaagactttagtagtgaatcggatctggaagaaagcaaagagaaactgaatgaaagcagtagctcatcagaaggtagcactgtggacatcggcgcacctgtagaagaacagcccgtagtggaacctgaagaaactcttgaaccagaagcttgtttcactgaaggctgtgtacaaagattcaagtgttgtcaaatcaatgtggaagaaggcagaggaaaacaatggtggaacctgagaaggacgtgtttccgaatagttgaacataactggtttgagaccttcattgttttcatgattctccttagtagtggtgctctggcatttgaagatatatatattgatcagcgaaagacgattaagacgatgttggaatatgctgacaaggttttcacttacattttcattctggaaatgcttctaaaatgggtggcatatggctatcaaacatatttcaccaatgcctggtgttggctggacttcttaattgttgatgtttcattggtcagtttaacagcaaatgccttgggttactcagaacttggagccatcaaatctctcaggacactaagagctctgagacctctaagagccttatctcgatttgaagggatgagggtggttgtgaatgcccttttaggagcaattccatccatcatgaatgtgcttctggtttgtcttatattctggctaattttcagcatcatgggcgtaaatttgtttgctggcaaattctaccactgtattaacaccacaactggtgacaggtttgacatcgaagacgtgaataatcatactgattgcctaaaactaatagaaagaaatgagactgctcgatggaaaaatgtgaaagtaaactttgataatgtaggatttgggtatctctctttgcttcaagttgccacattcaaaggatggatggatataatgtatgcagcagttgattccagaaatgtggaactccagcctaagtatgaagaaagtctgtacatgtatctttactttgttattttcatcatctttgggtccttcttcaccttgaacctgtttattggtgtcatcatagataatttcaaccagcagaaaaagaagtttggaggtcaagacatctttatgacagaagaacagaagaaatactataatgcaatgaaaaaattaggatcgaaaaaaccgcaaaagcctatacctcgaccaggaaacaaatttcaaggaatggtctttgacttcgtaaccagacaagtttttgacataagcatcatgattctcatctgtcttaacatggtcacaatgatggtggaaacagatgaccagagtgaatatgtgactaccattttgtcacgcatcaatctggtgttcattgtgctatttactggagagtgtgtactgaaactcatctctctacgccattattattttaccattggatggaatatttttgattttgtggttgtcattctctccattgtaggtatgtttcttgccgagctgatagaaaagtatttcgtgtcccctaccctgttccgagtgatccgtcttgctaggattggccgaatcctacgtctgatcaaaggagcaaaggggatccgcacgctgctctttgctttgatgatgtcccttcctgcgttgtttaacatcggcctcctactcttcctagtcatgttcatctacgccatctttgggatgtccaactttgcctatgttaagagggaagttgggatcgatgacatgttcaactttgagacctttggcaacagcatgatctgcctattccaaattacaacctctgctggctgggatggattgctagcacccattctcaacagtaagccacccgactgtgaccctaataaagttaaccctggaagctcagttaagggagactgtgggaacccatctgttggaattttcttttttgtcagttacatcatcatatccttcctggttgtggtgaacatgtacatcgcggtcatcctggagaacttcagtgttgctactgaagaaagtgcagagcctctgagtgaggatgactttgagatgttctatgaggtttgggagaagtttgatcccgatgcaactcagttcatggaatttgaaaaattatctcagtttgcagctgcgcttgaaccgcctctcaatctgccacaaccaaacaaactccagctcattgccatggatttgcccatggtgagtggtgaccggatccactgtcttgatatcttatttgcttttacaaagcgggttctaggagagagtggagagatggatgctctacgaatacagatggaagagcgattcatggcttccaatccttccaaggtctcctatcagccaatcactactactttaaaacgaaaacaagaggaagtatctgctgtcattattcagcgtgcttacagacgccaccttttaaagcgaactgtaaaacaagcttcctttacgtacaataaaaacaaaatcaaaggtggggctaatcttcttataaaagaagacatgataattgacagaataaatgaaaactctattacagaaaaaactgatctgaccatgtccactgcagcttgtccaccttcctatgaccgggtgacaaagccaattgtggaaaaacatgagcaagaaggcaaagatgaaaaagccaaagggaaataaatgaaaataaataaaaataattgggtgacaaattgtttacagcctgtgaaggtgatgtatttttatcaacaggactcctttaggaggtcaatgccaaactgactgtttttacacaaatctccttaaggtcagtgcctacaataagacagtgaccccttgtcagcaaactgtgactctgtgtaaaggggagatgaccttgacaggaggttactgttctcactaccagctgacactgctgaagataagatgcacaatggctagtcagactgtagggaccagtttcaaggggtgcaaacctgtgattttggggttgtttaacatgaaacactttagtgtagtaattgtatccactgtttgcatttcaactgccacatttgtcacatttttatggaatctgttagtggattcatctttttgttaatccatgtgtttattatatgtgactatttttgtaaacgaagtttctgttgagaaataggctaaggacctctataacaggtatgccacctggggggtatggcaaccacatggccctcccagctacacaaagtcgtggtttgcatgagggcatgctgcacttagagatcatgcatgagaaaaagtcacaagaaaaacaaattcttaaatttcaccatatttctgggaggggtaattgggtgataagtggaggtgctttgttgatcttgttttgcgaaatccagcccctagaccaagtagattatttgtgggtaggccagtaaatcttagcaggtgcaaacttcattcaaatgtttggagtcataaatgttatgtttctttttgttgtattaaaaaaaaaacctgaatagtgaatattgcccctcaccctccaccgccagaagactgaattgaccaaaattactctttataaatttctgctttttcctgcactttgtttagccatcttcggctctcagcaaggttgacactgtatatgttaatgaaatgctatttattatgtaaatagtcattttaccctgtggtgcacgtttgagcaaacaaataatgacctaagcacagtatttattgcatcaaatatgtaccacaagaaatgtagagtgcaagctttacacaggtaataaaatgtattctgtaccatttatagatagtttggatgctatcaatgcatgtttatattaccatgctgctgtatctggtttctctcactgctcagaatctcatttatgagaaaccatatgtcagtggtaaagtcaaggaaattgttcaacagatctcatttatttaagtcattaagcaatagtttgcagcactttaacagctttttggttatttttacattttaagtggataacatatggtatatagccagactgtacagacatgtttaaaaaaacacactgcttaacctattaaatatgtgtttagaattttataagcaaatataaatactgtaaaaagtcactttattttatttttcagcattatgtacataaatatgaagaggaaattatcttcaggttgatatcacaatcacttttcttactttctgtccatagtactttttcatgaaagaaatttgctaaataagacatgaaaacaagactgggtagttgtagatttctgctttttaaattacatttgctaattttagattatttcacaattttaaggagcaaaataggttcacgattcatatccaaattatgctttgcaattggaaaagggtttaaaattttatttatatttctggtagtacctgcactaactgaattgaaggtagtgcttatgttatttttgttctttttttctgacttcggtttatgttttcatttctttggagtaatgctgctctagattgttctaaatagaatgtgggcttcataatttttttttccacaaaaacagagtagtcaacttatatagtcaattacatcaggacattttgtgtttcttacagaagcaaaccataggctcctcttttccttaaaactacttagataaactgtattcgtgaactgcatgctggaaaatgctactattatgctaaataatgctaaccaacatttaaaatgtgcaaaactaataaagattacattttttattttattgtttgcccagtcactttttgttaacagaatattctaatgatatggagattttttacattacaaattgggggagaaggggagcgcgcgcgcacacacacacacacacacacacacacacacacacacacagaggcatacccacgttgacaacaaaacctagggtagatatgtcactggaggtagggggtaatgacctcccagaattacaagcagcaggtgtgttctctgttaggaggaagaactggtgtcagaggatagctagtgattctaggaggaagagaagtatggaagccagagtgatggtggatgaccccttgagctatgaaaagaaacccttaaatcatcatttaaaaatttagaattgccatgtgtgtaggatactgtgtttgctcctccagagccactctctctgcttctgcatcattctgtgtgtcccagaagggtgacttctacacattgcaaaaatgggctctcctacctttgagctcccaattggtttggccaatgagaagcaccagtgggaaagcaccagagagagaagattgacataggaatatttcttctccaattccttctttgctgggttggcactggactcattcctccccgaaaagtcatactccaatcagactgcccctcatacaactgaagctactttctctggggtcaggtaatcactcctccccttgctccttcaggtctgctgctgcattgagagtgcttttgtattccttgtagctttctcctaacattgctgacacttttgtaaatgtccccttcatgaaattcttctatatgcctcatttcagcatgccatctgtctcctgcctggctgacacaaggtgattcaacagctcatgaaagtcagcaggaagcaaagatgtgccttgcttcagcttggggtcttaatcttgctaacttttgcagataaagaaaaacagtaactgggggaaccacagtgaagtccagtgcagaattcacagatatcatggaaaggttactcgggtggtccagatagtaaaattaacagtctaaattaatctatctaaatttctgaggaacgagaagccttcccttgtcatcaggtgaagccagaagagggaatatagcctcaaccagaaaagggacagtaattaaaaggcttttcccatccttgtacaatggactgactttgcctcttcataacatcacaatcctaaagcaacacaacaattaattctgatatattagtagctgaaaaaaattcccatttccaactaaggtaggtcagaattataggataaaccctgcagactttttatactacccatccacgccattactcactgttacctttccaaatacaaagagaagaactggtaaaacataatcatataaatctccatattcattttgaaatatttggcatgatattttctgtgctaaaaagtaattattcttcaaagaatgatgaggtcatgtcagtaagacacaggaaccaactagaaggggcttcccactggccaaatctggggcaagttgagcatcaaaataaatgatagtaaaagattataattcattgaataagaatcagcaaatacatactgatgtaagtaaataaggaaaagtacaaatctgtttcttgcagttgaatgttaattaacaattgtagaagaaataacggagttagaaaaatcactatttggcaatcaccctaatgacaattgattcatacaagaatcatcaatgagtattaaaactcatgggtgaaagtttgatgaggaatagggtatttatagcatcttaaagtatctcttctctattaagtagaaaatttaaacagaagaaagtatactttggagaaatacagcagacaataccttcaaagatatcatcaattatgagaccaactgatactatgtgcctcctgataagatatactgaaagggccacattacttcttggtacacagtcaaaattttaaaaccagaatctaactacaaggaaaatcaaattgaggacactctataaaataagtggactgaactccttaaaaatgtcaatgtcatgaaagacaaagaaaggctaaagaattccatgaggtcaaagaactatgacaactaaacacaattctggatggaatatcaaattaaaaaataacagataaataatattattgggaaagttgaataaatttgaatatggactgtttattagttattagtattataatagtgttaattttcctaattttgttaagactagtgtgcctgttccatgaaaatagaaaatgttcttattctctgaaaatgcatgctaaagtatttaggggtgaatgcaacaatgtctgcagctcattcttgaatcagttcaaagaaaaatgagttacatttatatatatatgtatgtatgtaaacagacatagataaaagtatagatgtgtgtgtgtctttagaaaggggaggattttttttttttttttgctgtgtgttactgaagtgcctatgtctgcgtgttcacactatcatattttgtatgccctggactttataatttctaccttcaaaattagatctactgttggtaattaattcaatatatactggttttttaactactattctcatttcctagcagtaatcttcctgaaaagtcacagaaatgattacattccttgttcttcataataatcactgtttaattaaaataagaatattttagaaaagatctgcggcatagtggttaagaccccagtatttgatgctaaacagatctgatttggataacagaaggtggcactttgctgtttaagctggggaccagacactgtgggtataaatagtaattccaaacacagctccacagagcagcacccttatgacaaggttttcatatgtctatagttaagccagaaaattaagaataatgccataaatatttataaagctgaacatatccaagttaaagacctttatcctgaaattgtatcttttagattattttctaaagactaataccatttaatgtttaaatgttctttggaaatgatggtgagaatacgtgataatgggtcattggttttaatattttatttagccaagtggaaaattggcaacctggtgtcggtcctcccatttgtattttactggtgcatgaaatccaaaagtctagtaaccattgggacagacaactctactgcataagtttgtatgtttgtatatctgtatcacaaagcccagacactcgaactatataaacttgtcgcactaaagacagcaaatatgtctggtaattgcatattcttcatgtgtgcactggaatttcttattatataagaaaataaatgtgtttctaaaccaccatgaa

SEQ ID NO: 563 - DNA, 4676 bp, Homo sapiens
  source 1..4676: mol_type = genomic DNA
accatagagtgaggcgaggatgaagccgagaggatactgcagaggtctctggtgcatgtgtgtatgtgtgcgtttgtgtgtgtttgtgtgtctgtgtgttctgccccagtgagactgcagcccttgtaaatactttgacaccttttgcaagaaggaatctgaacaattgcaactgaaggcacattgttatcatctcgtctttgggtgatgctgttcctcactgcagatggataattttccttttaatcaggtttgggcaattatgaataaggctgctgtatacatccgtgtgcaggattttgtgtggacataagttttcaactcctttggttaaatcctaaggaatttcatatgcagaataaatggtaattaaaatgtgcaggatgacaagatggagcaaacagtgcttgtaccaccaggacctgacagcttcaacttcttcaccagagaatctcttgcggctattgaaagacgcattgcagaagaaaaggcaaagaatcccaaaccagacaaaaaagatgacgacgaaaatggcccaaagccaaatagtgacttggaagctggaaagaaccttccatttatttatggagacattcctccagagatggtgtcagagcccctggaggacctggacccctactatatcaataagaaaacttttatagtattgaataaagggaaggccatcttccggttcagtgccacctctgccctgtacattttaactcccttcaatcctcttaggaaaatagctattaagattttggtacattcattattcagcatgctaattatgtgcactattttgacaaactgtgtgtttatgacaatgagtaaccctcctgattggacaaagaatgtagaatacaccttcacaggaatatatacttttgaatcacttataaaaattattgcaaggggattctgtttagaagattttactttccttcgggatccatggaactggctcgatttcactgtcattacatttgcgtacgtcacagagtttgtggacctgggcaatgtctcggcattgagaacattcagagttctccgagcattgaagacgatttcagtcattccaggcctgaaaaccattgtgggagccctgatccagtctgtgaagaagctctcagatgtaatgatcctgactgtgttctgtctgagcgtatttgctctaattgggctgcagctgttcatgggcaacctgaggaataaatgtatacaatggcctcccaccaatgcttccttggaggaacatagtatagaaaagaatataactgtgaattataatggtacacttataaatgaaactgtctttgagtttgactggaagtcatatattcaagattcaagatatcattatttcctggagggttttttagatgcactactatgtggaaatagctctgatgcaggccaatgtccagagggatatatgtgtgtgaaagctggtagaaatcccaattatggctacacaagctttgataccttcagttgggcttttttgtccttgtttcgactaatgactcaggacttctgggaaaatctttatcaactgacattacgtgctgctgggaaaacgtacatgatattttttgtattggtcattttcttgggctcattctacctaataaatttgatcctggctgtggtggccatggcctacgaggaacagaatcaggccaccttggaagaagcagaacagaaagaggccgaatttcagcagatgattgaacagcttaaaaagcaacaggaggcagctcagcaggcagcaacggcaactgcctcagaacattccagagagcccagtgcagcaggcaggctctcagacagctcatctgaagcctctaagttgagttccaagagtgctaaggaaagaagaaatcggaggaagaaaagaaaacagaaagagcagtctggtggggaagagaaagatgaggatgaattccaaaaatctgaatctgaggacagcatcaggaggaaaggttttcgcttctccattgaagggaaccgattgacatatgaaaagaggtactcctccccacaccagtctttgttgagcatccgtggctccctattttcaccaaggcgaaatagcagaacaagccttttcagctttagagggcgagcaaaggatgtgggatctgagaacgacttcgcagatgatgagcacagcacctttgaggataacgagagccgtagagattccttgtttgtgccccgacgacacggagagagacgcaacagcaacctgagtcagaccagtaggtcatcccggatgctggcagtgtttccagcgaatgggaagatgcacagcactgtggattgcaatggtgtggtttccttggttggtggaccttcagttcctacatcgcctgttggacagcttctgccagaggtgataatagataagccagctactgatgacaatggaacaaccactgaaactgaaatgagaaagagaaggtcaagttctttccacgtttccatggactttctagaagatccttcccaaaggcaacgagcaatgagtatagccagcattctaacaaatacagtagaagaacttgaagaatccaggcagaaatgcccaccctgttggtataaattttccaacatattcttaatctgggactgttctccatattggttaaaagtgaaacatgttgtcaacctggttgtgatggacccatttgttgacctggccatcaccatctgtattgtcttaaatactcttttcatggccatggagcactatccaatgacggaccatttcaataatgtgcttacagtaggaaacttggttttcactgggatctttacagcagaaatgtttctgaaaattattgccatggatccttactattatttccaagaaggctggaatatctttgacggttttattgtgacgcttagcctggtagaacttggactcgccaatgtggaaggattatctgttctccgttcatttcgattgctgcgagttttcaagttggcaaaatcttggccaacgttaaatatgctaataaagatcatcggcaattccgtgggggctctgggaaatttaaccctcgtcttggccatcatcgtcttcatttttgccgtggtcggcatgcagctctttggtaaaagctacaaagattgtgtctgcaagatcgccagtgattgtcaactcccacgctggcacatgaatgacttcttccactccttcctgattgtgttccgcgtgctgtgtggggagtggatagagaccatgtgggactgtatggaggttgctggtcaagccatgtgccttactgtcttcatgatggtcatggtgattggaaacctagtggtcctgaatctctttctggccttgcttctgagctcatttagtgcagacaaccttgcagccactgatgatgataatgaaatgaataatctccaaattgctgtggataggatgcacaaaggagtagcttatgtgaaaagaaaaatatatgaatttattcaacagtccttcattaggaaacaaaagattttagatgaaattaaaccacttgatgatctaaacaacaagaaagacagttgtatgtccaatcatacagcagaaattgggaaagatcttgactatcttaaagatgtaaatggaactacaagtggtataggaactggcagcagtgttgaaaaatacattattgatgaaagtgattacatgtcattcataaacaaccccagtcttactgtgactgtaccaattgctgtaggagaatctgactttgaaaatttaaacacggaagactttagtagtgaatcggatctggaagaaagcaaagagaaactgaatgaaagcagtagctcatcagaaggtagcactgtggacatcggcgcacctgtagaagaacagcccgtagtggaacctgaagaaactcttgaaccagaagcttgtttcactgaaggctgtgtacaaagattcaagtgttgtcaaatcaatgtggaagaaggcagaggaaaacaatggtggaacctgagaaggacgtgtttccgaatagttgaacataactggtttgagaccttcattgttttcatgattctccttagtagtggtgctctggcatttgaagatatatatattgatcagcgaaagacgattaagacgatgttggaatatgctgacaaggttttcacttacattttcattctggaaatgcttctaaaatgggtggcatatggctatcaaacatatttcaccaatgcctggtgttggctggacttcttaattgttgatgtttcattggtcagtttaacagcaaatgccttgggttactcagaacttggagccatcaaatctctcaggacactaagagctctgagacctctaagagccttatctcgatttgaagggatgagggataatcttgctccaacttggatggggtggagcgctggttcctcccctgagccctttattatgggtggttgtgaatgcccttttaggagcaattccatccatcatgaatgtgcttctggtttgtcttatattctggctaattttcagcatcatgggcgtaaatttgtttgctggcaaattctaccactgtattaacaccacaactggtgacaggtttgacatcgaagacgtgaataatcatactgattgcctaaaactaatagaaagaaatgagactgctcga

SEQ ID NO: 564 - DNA, 8895 bp, Homo sapiens
  source 1..8895: mol_type = genomic DNA
aacagacattgggtaccatcgaatgactgtcagaacagaaagctaaggcaaaggagggaggatgctgtggtcatcctttcttgtttttttcttctttaatgaggatagagcacatgtgagattttactttctactccagtaaaaattctgaagaattgcattggagactgttatattcaacacatacgtggattctgtgttatgatttacatttttctttatttcaggggtttttctccctttgcttgacacttctctgtcctgacaccttgagaagaaggatgtgtttgcttacccttccgccatgattgtaaatttcctgaggccttcccagccatgcagcactcactttcttatgcaaggagctaaacagtgattaaaggagcaggatgaaaagatggcacagtcagtgctggtaccgccaggacctgacagcttccgcttctttaccagggaatcccttgctgctattgaacaacgcattgcagaagagaaagctaagagacccaaacaggaacgcaaggatgaggatgatgaaaatggcccaaagccaaacagtgacttggaagcaggaaaatctcttccatttatttatggagacattcctccagagatggtgtcagtgcccctggaggatctggacccctactatatcaataagaaaacgtttatagtattgaataaagggaaagcaatctctcgattcagtgccacccctgccctttacattttaactcccttcaaccctattagaaaattagctattaagattttggtacattctttattcaatatgctcattatgtgcacgattcttaccaactgtgtatttatgaccatgagtaaccctccagactggacaaagaatgtggagtatacctttacaggaatttatacttttgaatcacttattaaaatacttgcaaggggcttttgtttagaagatttcacatttttacgggatccatggaattggttggatttcacagtcattacttttgcgtatgtaacagaatttgtaaacctaggcaatgtttcagctcttcgaactttcagagtcttgagagctttgaaaactatttctgtaattccaggcctgaagaccattgtgggggccctgatccagtcagtgaagaagctttctgatgtcatgatcttgactgtgttctgtctaagcgtgtttgcgctaataggattgcagttgttcatgggcaacctacgaaataaatgtttgcaatggcctccagataattcttcctttgaaataaatatcacttccttctttaacaattcattggatgggaatggtactactttcaataggacagtgagcatatttaactgggatgaatatattgaggataaaagtcacttttattttttagaggggcaaaatgatgctctgctttgtggcaacagctcagatgcaggccagtgtcctgaaggatacatctgtgtgaaggctggtagaaaccccaactatggctacacgagctttgacacctttagttgggcctttttgtccttatttcgtctcatgactcaagacttctgggaaaacctttatcaactgacactacgtgctgctgggaaaacgtacatgatattttttgtgctggtcattttcttgggctcattctatctaataaatttgatcttggctgtggtggccatggcctatgaggaacagaatcaggccacattggaagaggctgaacagaaggaagctgaatttcagcagatgctcgaacagttgaaaaagcaacaagaagaagctcaggcggcagctgcagccgcatctgctgaatcaagagacttcagtggtgctggtgggataggagttttttcagagagttcttcagtagcatctaagttgagctccaaaagtgaaaaagagctgaaaaacagaagaaagaaaaagaaacagaaagaacagtctggagaagaagagaaaaatgacagagtccgaaaatcggaatctgaagacagcataagaagaaaaggtttccgtttttccttggaaggaagtaggctgacatatgaaaagagattttcttctccacaccagtccttactgagcatccgtggctcccttttctctccaagacgcaacagtagggcgagccttttcagcttcagaggtcgagcaaaggacattggctctgagaatgactttgctgatgatgagcacagcacctttgaggacaatgacagccgaagagactctctgttcgtgccgcacagacatggagaacggcgccacagcaatgtcagccaggccagccgtgcctccagggtgctccccatcctgcccatgaatgggaagatgcatagcgctgtggactgcaatggtgtggtctccctggtcgggggcccttctaccctcacatctgctgggcagctcctaccagagggcacaactactgaaacagaaataagaaagagacggtccagttcttatcatgtttccatggatttattggaagatcctacatcaaggcaaagagcaatgagtatagccagtattttgaccaacaccatggaagaacttgaagaatccagacagaaatgcccaccatgctggtataaatttgctaatatgtgtttgatttgggactgttgtaaaccatggttaaaggtgaaacaccttgtcaacctggttgtaatggacccatttgttgacctggccatcaccatctgcattgtcttaaatacactcttcatggctatggagcactatcccatgacggagcagttcagcagtgtactgtctgttggaaacctggtcttcacagggatcttcacagcagaaatgtttctcaagataattgccatggatccatattattactttcaagaaggctggaatatttttgatggttttattgtgagccttagtttaatggaacttggtttggcaaatgtggaaggattgtcagttctccgatcattccggctgctccgagttttcaagttggcaaaatcttggccaactctaaatatgctaattaagatcattggcaattctgtgggggctctaggaaacctcaccttggtattggccatcatcgtcttcatttttgctgtggtcggcatgcagctctttggtaagagctacaaagaatgtgtctgcaagatttccaatgattgtgaactcccacgctggcacatgcatgactttttccactccttcctgatcgtgttccgcgtgctgtgtggagagtggatagagaccatgtgggactgtatggaggtcgctggccaaaccatgtgccttactgtcttcatgatggtcatggtgattggaaatctagtggttctgaacctcttcttggccttgcttttgagttccttcagttctgacaatcttgctgccactgatgatgataacgaaatgaataatctccagattgctgtgggaaggatgcagaaaggaatcgattttgttaaaagaaaaatacgtgaatttattcagaaagcctttgttaggaagcagaaagctttagatgaaattaaaccgcttgaagatctaaataataaaaaagacagctgtatttccaaccataccaccatagaaataggcaaagacctcaattatctcaaagacggaaatggaactactagtggcataggcagcagtgtagaaaaatatgtcgtggatgaaagtgattacatgtcatttataaacaaccctagcctcactgtgacagtaccaattgctgttggagaatctgactttgaaaatttaaatactgaagaattcagcagcgagtcagatatggaggaaagcaaagagaagctaaatgcaactagttcatctgaaggcagcacggttgatattggagctcccgccgagggagaacagcctgaggttgaacctgaggaatcccttgaacctgaagcctgttttacagaagactgtgtacggaagttcaagtgttgtcagataagcatagaagaaggcaaagggaaactctggtggaatttgaggaaaacatgctataagatagtggagcacaattggttcgaaaccttcattgtcttcatgattctgctgagcagtggggctctggcctttgaagatatatacattgagcagcgaaaaaccattaagaccatgttagaatatgctgacaaggttttcacttacatattcattctggaaatgctgctaaagtgggttgcatatggttttcaagtgtattttaccaatgcctggtgctggctagacttcctgattgttgatgtctcactggttagcttaactgcaaatgccttgggttactcagaacttggtgccatcaaatccctcagaacactaagagctctgaggccactgagagctttgtcccggtttgaaggaatgagggttgttgtaaatgctcttttaggagccattccatctatcatgaatgtacttctggtttgtctgatcttttggctaatattcagtatcatgggagtgaatctctttgctggcaagttttaccattgtattaattacaccactggagagatgtttgatgtaagcgtggtcaacaactacagtgagtgcaaagctctcattgagagcaatcaaactgccaggtggaaaaatgtgaaagtaaactttgataacgtaggacttggatatctgtctctacttcaagtagccacgtttaagggatggatggatattatgtatgcagctgttgattcacgaaatgtagaattacaacccaagtatgaagacaacctgtacatgtatctttattttgtcatctttattatttttggttcattctttaccttgaatcttttcattggtgtcatcatagataacttcaaccaacagaaaaagaagtttggaggtcaagacatttttatgacagaagaacagaagaaatactacaatgcaatgaaaaaactgggttcaaagaaaccacaaaaacccatacctcgacctgctaacaaattccaaggaatggtctttgattttgtaaccaaacaagtctttgatatcagcatcatgatcctcatctgccttaacatggtcaccatgatggtggaaaccgatgaccagagtcaagaaatgacaaacattctgtactggattaatctggtgtttattgttctgttcactggagaatgtgtgctgaaactgatctctcttcgttactactatttcactattggatggaatatttttgattttgtggtggtcattctctccattgtaggaatgtttctggctgaactgatagaaaagtattttgtgtcccctaccctgttccgagtgatccgtcttgccaggattggccgaatcctacgtctgatcaaaggagcaaaggggatccgcacgctgctctttgctttgatgatgtcccttcctgcgttgtttaacatcggcctccttcttttcctggtcatgttcatctacgccatctttgggatgtccaattttgcctatgttaagagggaagttgggatcgatgacatgttcaactttgagacctttggcaacagcatgatctgcctgttccaaattacaacctctgctggctgggatggattgctagcacctattcttaatagtggacctccagactgtgaccctgacaaagatcaccctggaagctcagttaaaggagactgtgggaacccatctgttgggattttcttttttgtcagttacatcatcatatccttcctggttgtggtgaacatgtacatcgcggtcatcctggagaacttcagtgttgctactgaagaaagtgcagagcctctgagtgaggatgactttgagatgttctatgaggtttgggagaagtttgatcccgatgcgacccagtttatagagtttgccaaactttctgattttgcagatgccctggatcctcctcttctcatagcaaaacccaacaaagtccagctcattgccatggatctgcccatggtgagtggtgaccggatccactgtcttgacatcttatttgcttttacaaagcgtgttttgggtgagagtggagagatggatgcccttcgaatacagatggaagagcgattcatggcatcaaacccctccaaagtctcttatgagcccattacgaccacgttgaaacgcaaacaagaggaggtgtctgctattattatccagagggcttacagacgctacctcttgaagcaaaaagttaaaaaggtatcaagtatatacaagaaagacaaaggcaaagaatgtgatggaacacccatcaaagaagatactctcattgataaactgaatgagaattcaactccagagaaaaccgatatgacgccttccaccacgtctccaccctcgtatgatagtgtgaccaaaccagaaaaagaaaaatttgaaaaagacaaatcagaaaaggaagacaaagggaaagatatcagggaaagtaaaaagtaaaaagaaaccaagaattttccattttgtgatcaattgtttacagcccgtgatggtgatgtgtttgtgtcaacaggactcccacaggaggtctatgccaaactgactgtttttacaaatgtatacttaaggtcagtgcctataacaagacagagacctctggtcagcaaactggaactcagtaaactggagaaatagtatcgatgggaggtttctattttcacaaccagctgacactgctgaagagcagaggcgtaatggctactcagacgataggaaccaatttaaaggggggagggaagttaaatttttatgtaaattcaacatgtgacacttgataatagtaattgtcaccagtgtttatgttttaactgccacacctgccatatttttacaaaacgtgtgctgtgaatttatcacttttctttttaattcacaggttgtttactattatatgtgactatttttgtaaatgggtttgtgtttggggagagggattaaagggagggaattctacatttctctattgtattgtataactggatatattttaaatggaggcatgctgcaattctcattcacacataaaaaaatcacatcacaaaagggaagagtttacttcttgtttcaggatgtttttagatttttgaggtgcttaaatagctattcgtatttttaaggtgtctcatccagaaaaaatttaatgtgcctgtaaatgttccatagaatcacaagcattaaagagttgttttatttttacataacccattaaatgtacatgtatatatgtatatatgtatatgtgcgtgtatatacatatatatgtatacacacatgcacacacagagatatacacataccattacattgtcattcacagtcccagcagcatgactatcacatttttgataagtgtcctttggcataaaataaaaatatcctatcagtcctttctaagaagcctgaattgaccaaaaaacatccccaccaccactttataaagttgattctgctttatcctgcagtattgtttagccatcttctgctcttggtaaggttgacatagtatatgtcaatttaaaaaataaaagtctgctttgtaaatagtaattttacccagtggtgcatgtttgagcaaacaaaaatgatgatttaagcacactacttattgcatcaaatatgtaccacagtaagtatagtttgcaagctttcaacaggtaatatgatgtaattggttccattatagtttgaagctgtcactgctgcatgtttatcttgcctatgctgctgtatcttattccttccactgttcagaagtctaatatgggaagccatatatcagtggtaaagtgaagcaaattgttctaccaagacctcattcttcatgtcattaagcaataggttgcagcaaacaaggaagagcttcttgctttttattcttccaaccttaattgaacactcaatgatgaaaagcccgactgtacaaacatgttgcaagctgcttaaatctgtttaaaatatatggttagagttttctaagaaaatataaatactgtaaaaagttcattttattttatttttcagccttttgtacgtaaaatgagaaattaaaagtatcttcaggtggatgtcacagtcactattgttagtttctgttcctagcacttttaaattgaagcacttcacaaaataagaagcaaggactaggatgcagtgtaggtttctgcttttttattagtactgtaaacttgcacacatttcaatgtgaaacaaatctcaaactgagttcaatgtttatttgctttcaatagtaatgccttatcattgaaagaggcttaaagaaaaaaaaaatcagctgatactcttggcattgcttgaatccaatgtttccacctagtctttttattcagtaatcatcagtcttttccaatgtttgtttacacagatagatcttattgacccatatggcactagaactgtatcagatataatatgggatcccagctttttttcctctcccacaaaaccaggtagtgaagttatattaccagttacagcaaaatactttgtgtttcacaagcaacaataaatgtagattctttatactgaagctattgacttgtagtgtgttggtgaaatgcatgcaggaaaatgctgttaccataaagaacggtaaaccacattacaatcaagccaaaagaataaaggtttcgcttttgtttttgtatttaattgttgtctttgtttctatctttgaaatgccatttaaaggtagatttctatcatgtaaaaataatctatctgaaaaacaaatgtaaagaacacacattaattactataattcatctttcaattttttcatggaatggaagttaattaagaagagtgtattggataactactttaatattggccaaaaagctagatatggcatcaggtagactagtggaaagttacaaaaattaataaaaaattgactaaca

SEQ ID NO: 565 - DNA, 8776 bp, Homo sapiens
  source 1..8776: mol_type = genomic DNA
aacagacattgggtaccatcgaatgactgtcagaacagaaagctaaggcaaaggagggaggatgctgtggtcatcctttcttgtttttttcttctttaatgaggatagagcacatgtgagattttactttctactccagtaaaaattctgaagaattgcattggagactgttatattcaacacatacgtggattctgtgttatgatttacatttttctttatttcagcactttcttatgcaaggagctaaacagtgattaaaggagcaggatgaaaagatggcacagtcagtgctggtaccgccaggacctgacagcttccgcttctttaccagggaatcccttgctgctattgaacaacgcattgcagaagagaaagctaagagacccaaacaggaacgcaaggatgaggatgatgaaaatggcccaaagccaaacagtgacttggaagcaggaaaatctcttccatttatttatggagacattcctccagagatggtgtcagtgcccctggaggatctggacccctactatatcaataagaaaacgtttatagtattgaataaagggaaagcaatctctcgattcagtgccacccctgccctttacattttaactcccttcaaccctattagaaaattagctattaagattttggtacattctttattcaatatgctcattatgtgcacgattcttaccaactgtgtatttatgaccatgagtaaccctccagactggacaaagaatgtggagtatacctttacaggaatttatacttttgaatcacttattaaaatacttgcaaggggcttttgtttagaagatttcacatttttacgggatccatggaattggttggatttcacagtcattacttttgcgtatgtaacagaatttgtaaacctaggcaatgtttcagctcttcgaactttcagagtcttgagagctttgaaaactatttctgtaattccaggcctgaagaccattgtgggggccctgatccagtcagtgaagaagctttctgatgtcatgatcttgactgtgttctgtctaagcgtgtttgcgctaataggattgcagttgttcatgggcaacctacgaaataaatgtttgcaatggcctccagataattcttcctttgaaataaatatcacttccttctttaacaattcattggatgggaatggtactactttcaataggacagtgagcatatttaactgggatgaatatattgaggataaaagtcacttttattttttagaggggcaaaatgatgctctgctttgtggcaacagctcagatgcaggccagtgtcctgaaggatacatctgtgtgaaggctggtagaaaccccaactatggctacacgagctttgacacctttagttgggcctttttgtccttatttcgtctcatgactcaagacttctgggaaaacctttatcaactgacactacgtgctgctgggaaaacgtacatgatattttttgtgctggtcattttcttgggctcattctatctaataaatttgatcttggctgtggtggccatggcctatgaggaacagaatcaggccacattggaagaggctgaacagaaggaagctgaatttcagcagatgctcgaacagttgaaaaagcaacaagaagaagctcaggcggcagctgcagccgcatctgctgaatcaagagacttcagtggtgctggtgggataggagttttttcagagagttcttcagtagcatctaagttgagctccaaaagtgaaaaagagctgaaaaacagaagaaagaaaaagaaacagaaagaacagtctggagaagaagagaaaaatgacagagtccgaaaatcggaatctgaagacagcataagaagaaaaggtttccgtttttccttggaaggaagtaggctgacatatgaaaagagattttcttctccacaccagtccttactgagcatccgtggctcccttttctctccaagacgcaacagtagggcgagccttttcagcttcagaggtcgagcaaaggacattggctctgagaatgactttgctgatgatgagcacagcacctttgaggacaatgacagccgaagagactctctgttcgtgccgcacagacatggagaacggcgccacagcaatgtcagccaggccagccgtgcctccagggtgctccccatcctgcccatgaatgggaagatgcatagcgctgtggactgcaatggtgtggtctccctggtcgggggcccttctaccctcacatctgctgggcagctcctaccagagggcacaactactgaaacagaaataagaaagagacggtccagttcttatcatgtttccatggatttattggaagatcctacatcaaggcaaagagcaatgagtatagccagtattttgaccaacaccatggaagaacttgaagaatccagacagaaatgcccaccatgctggtataaatttgctaatatgtgtttgatttgggactgttgtaaaccatggttaaaggtgaaacaccttgtcaacctggttgtaatggacccatttgttgacctggccatcaccatctgcattgtcttaaatacactcttcatggctatggagcactatcccatgacggagcagttcagcagtgtactgtctgttggaaacctggtcttcacagggatcttcacagcagaaatgtttctcaagataattgccatggatccatattattactttcaagaaggctggaatatttttgatggttttattgtgagccttagtttaatggaacttggtttggcaaatgtggaaggattgtcagttctccgatcattccggctgctccgagttttcaagttggcaaaatcttggccaactctaaatatgctaattaagatcattggcaattctgtgggggctctaggaaacctcaccttggtattggccatcatcgtcttcatttttgctgtggtcggcatgcagctctttggtaagagctacaaagaatgtgtctgcaagatttccaatgattgtgaactcccacgctggcacatgcatgactttttccactccttcctgatcgtgttccgcgtgctgtgtggagagtggatagagaccatgtgggactgtatggaggtcgctggccaaaccatgtgccttactgtcttcatgatggtcatggtgattggaaatctagtggttctgaacctcttcttggccttgcttttgagttccttcagttctgacaatcttgctgccactgatgatgataacgaaatgaataatctccagattgctgtgggaaggatgcagaaaggaatcgattttgttaaaagaaaaatacgtgaatttattcagaaagcctttgttaggaagcagaaagctttagatgaaattaaaccgcttgaagatctaaataataaaaaagacagctgtatttccaaccataccaccatagaaataggcaaagacctcaattatctcaaagacggaaatggaactactagtggcataggcagcagtgtagaaaaatatgtcgtggatgaaagtgattacatgtcatttataaacaaccctagcctcactgtgacagtaccaattgctgttggagaatctgactttgaaaatttaaatactgaagaattcagcagcgagtcagatatggaggaaagcaaagagaagctaaatgcaactagttcatctgaaggcagcacggttgatattggagctcccgccgagggagaacagcctgaggttgaacctgaggaatcccttgaacctgaagcctgttttacagaagactgtgtacggaagttcaagtgttgtcagataagcatagaagaaggcaaagggaaactctggtggaatttgaggaaaacatgctataagatagtggagcacaattggttcgaaaccttcattgtcttcatgattctgctgagcagtggggctctggcctttgaagatatatacattgagcagcgaaaaaccattaagaccatgttagaatatgctgacaaggttttcacttacatattcattctggaaatgctgctaaagtgggttgcatatggttttcaagtgtattttaccaatgcctggtgctggctagacttcctgattgttgatgtctcactggttagcttaactgcaaatgccttgggttactcagaacttggtgccatcaaatccctcagaacactaagagctctgaggccactgagagctttgtcccggtttgaaggaatgagggttgttgtaaatgctcttttaggagccattccatctatcatgaatgtacttctggtttgtctgatcttttggctaatattcagtatcatgggagtgaatctctttgctggcaagttttaccattgtattaattacaccactggagagatgtttgatgtaagcgtggtcaacaactacagtgagtgcaaagctctcattgagagcaatcaaactgccaggtggaaaaatgtgaaagtaaactttgataacgtaggacttggatatctgtctctacttcaagtagccacgtttaagggatggatggatattatgtatgcagctgttgattcacgaaatgtagaattacaacccaagtatgaagacaacctgtacatgtatctttattttgtcatctttattatttttggttcattctttaccttgaatcttttcattggtgtcatcatagataacttcaaccaacagaaaaagaagtttggaggtcaagacatttttatgacagaagaacagaagaaatactacaatgcaatgaaaaaactgggttcaaagaaaccacaaaaacccatacctcgacctgctaacaaattccaaggaatggtctttgattttgtaaccaaacaagtctttgatatcagcatcatgatcctcatctgccttaacatggtcaccatgatggtggaaaccgatgaccagagtcaagaaatgacaaacattctgtactggattaatctggtgtttattgttctgttcactggagaatgtgtgctgaaactgatctctcttcgttactactatttcactattggatggaatatttttgattttgtggtggtcattctctccattgtaggaatgtttctggctgaactgatagaaaagtattttgtgtcccctaccctgttccgagtgatccgtcttgccaggattggccgaatcctacgtctgatcaaaggagcaaaggggatccgcacgctgctctttgctttgatgatgtcccttcctgcgttgtttaacatcggcctccttcttttcctggtcatgttcatctacgccatctttgggatgtccaattttgcctatgttaagagggaagttgggatcgatgacatgttcaactttgagacctttggcaacagcatgatctgcctgttccaaattacaacctctgctggctgggatggattgctagcacctattcttaatagtggacctccagactgtgaccctgacaaagatcaccctggaagctcagttaaaggagactgtgggaacccatctgttgggattttcttttttgtcagttacatcatcatatccttcctggttgtggtgaacatgtacatcgcggtcatcctggagaacttcagtgttgctactgaagaaagtgcagagcctctgagtgaggatgactttgagatgttctatgaggtttgggagaagtttgatcccgatgcgacccagtttatagagtttgccaaactttctgattttgcagatgccctggatcctcctcttctcatagcaaaacccaacaaagtccagctcattgccatggatctgcccatggtgagtggtgaccggatccactgtcttgacatcttatttgcttttacaaagcgtgttttgggtgagagtggagagatggatgcccttcgaatacagatggaagagcgattcatggcatcaaacccctccaaagtctcttatgagcccattacgaccacgttgaaacgcaaacaagaggaggtgtctgctattattatccagagggcttacagacgctacctcttgaagcaaaaagttaaaaaggtatcaagtatatacaagaaagacaaaggcaaagaatgtgatggaacacccatcaaagaagatactctcattgataaactgaatgagaattcaactccagagaaaaccgatatgacgccttccaccacgtctccaccctcgtatgatagtgtgaccaaaccagaaaaagaaaaatttgaaaaagacaaatcagaaaaggaagacaaagggaaagatatcagggaaagtaaaaagtaaaaagaaaccaagaattttccattttgtgatcaattgtttacagcccgtgatggtgatgtgtttgtgtcaacaggactcccacaggaggtctatgccaaactgactgtttttacaaatgtatacttaaggtcagtgcctataacaagacagagacctctggtcagcaaactggaactcagtaaactggagaaatagtatcgatgggaggtttctattttcacaaccagctgacactgctgaagagcagaggcgtaatggctactcagacgataggaaccaatttaaaggggggagggaagttaaatttttatgtaaattcaacatgtgacacttgataatagtaattgtcaccagtgtttatgttttaactgccacacctgccatatttttacaaaacgtgtgctgtgaatttatcacttttctttttaattcacaggttgtttactattatatgtgactatttttgtaaatgggtttgtgtttggggagagggattaaagggagggaattctacatttctctattgtattgtataactggatatattttaaatggaggcatgctgcaattctcattcacacataaaaaaatcacatcacaaaagggaagagtttacttcttgtttcaggatgtttttagatttttgaggtgcttaaatagctattcgtatttttaaggtgtctcatccagaaaaaatttaatgtgcctgtaaatgttccatagaatcacaagcattaaagagttgttttatttttacataacccattaaatgtacatgtatatatgtatatatgtatatgtgcgtgtatatacatatatatgtatacacacatgcacacacagagatatacacataccattacattgtcattcacagtcccagcagcatgactatcacatttttgataagtgtcctttggcataaaataaaaatatcctatcagtcctttctaagaagcctgaattgaccaaaaaacatccccaccaccactttataaagttgattctgctttatcctgcagtattgtttagccatcttctgctcttggtaaggttgacatagtatatgtcaatttaaaaaataaaagtctgctttgtaaatagtaattttacccagtggtgcatgtttgagcaaacaaaaatgatgatttaagcacactacttattgcatcaaatatgtaccacagtaagtatagtttgcaagctttcaacaggtaatatgatgtaattggttccattatagtttgaagctgtcactgctgcatgtttatcttgcctatgctgctgtatcttattccttccactgttcagaagtctaatatgggaagccatatatcagtggtaaagtgaagcaaattgttctaccaagacctcattcttcatgtcattaagcaataggttgcagcaaacaaggaagagcttcttgctttttattcttccaaccttaattgaacactcaatgatgaaaagcccgactgtacaaacatgttgcaagctgcttaaatctgtttaaaatatatggttagagttttctaagaaaatataaatactgtaaaaagttcattttattttatttttcagccttttgtacgtaaaatgagaaattaaaagtatcttcaggtggatgtcacagtcactattgttagtttctgttcctagcacttttaaattgaagcacttcacaaaataagaagcaaggactaggatgcagtgtaggtttctgcttttttattagtactgtaaacttgcacacatttcaatgtgaaacaaatctcaaactgagttcaatgtttatttgctttcaatagtaatgccttatcattgaaagaggcttaaagaaaaaaaaaatcagctgatactcttggcattgcttgaatccaatgtttccacctagtctttttattcagtaatcatcagtcttttccaatgtttgtttacacagatagatcttattgacccatatggcactagaactgtatcagatataatatgggatcccagctttttttcctctcccacaaaaccaggtagtgaagttatattaccagttacagcaaaatactttgtgtttcacaagcaacaataaatgtagattctttatactgaagctattgacttgtagtgtgttggtgaaatgcatgcaggaaaatgctgttaccataaagaacggtaaaccacattacaatcaagccaaaagaataaaggtttcgcttttgtttttgtatttaattgttgtctttgtttctatctttgaaatgccatttaaaggtagatttctatcatgtaaaaataatctatctgaaaaacaaatgtaaagaacacacattaattactataattcatctttcaattttttcatggaatggaagttaattaagaagagtgtattggataactactttaatattggccaaaaagctagatatggcatcaggtagactagtggaaagttacaaaaattaataaaaaattgactaaca

SEQ ID NO: 566 - DNA, 8776 bp, Homo sapiens
  source 1..8776: mol_type = genomic DNA
aacagacattgggtaccatcgaatgactgtcagaacagaaagctaaggcaaaggagggaggatgctgtggtcatcctttcttgtttttttcttctttaatgaggatagagcacatgtgagattttactttctactccagtaaaaattctgaagaattgcattggagactgttatattcaacacatacgtggattctgtgttatgatttacatttttctttatttcagcactttcttatgcaaggagctaaacagtgattaaaggagcaggatgaaaagatggcacagtcagtgctggtaccgccaggacctgacagcttccgcttctttaccagggaatcccttgctgctattgaacaacgcattgcagaagagaaagctaagagacccaaacaggaacgcaaggatgaggatgatgaaaatggcccaaagccaaacagtgacttggaagcaggaaaatctcttccatttatttatggagacattcctccagagatggtgtcagtgcccctggaggatctggacccctactatatcaataagaaaacgtttatagtattgaataaagggaaagcaatctctcgattcagtgccacccctgccctttacattttaactcccttcaaccctattagaaaattagctattaagattttggtacattctttattcaatatgctcattatgtgcacgattcttaccaactgtgtatttatgaccatgagtaaccctccagactggacaaagaatgtggagtatacctttacaggaatttatacttttgaatcacttattaaaatacttgcaaggggcttttgtttagaagatttcacatttttacgggatccatggaattggttggatttcacagtcattacttttgcatatgtgacagagtttgtggacctgggcaatgtctcagcgttgagaacattcagagttctccgagcattgaaaacaatttcagtcattccaggcctgaagaccattgtgggggccctgatccagtcagtgaagaagctttctgatgtcatgatcttgactgtgttctgtctaagcgtgtttgcgctaataggattgcagttgttcatgggcaacctacgaaataaatgtttgcaatggcctccagataattcttcctttgaaataaatatcacttccttctttaacaattcattggatgggaatggtactactttcaataggacagtgagcatatttaactgggatgaatatattgaggataaaagtcacttttattttttagaggggcaaaatgatgctctgctttgtggcaacagctcagatgcaggccagtgtcctgaaggatacatctgtgtgaaggctggtagaaaccccaactatggctacacgagctttgacacctttagttgggcctttttgtccttatttcgtctcatgactcaagacttctgggaaaacctttatcaactgacactacgtgctgctgggaaaacgtacatgatattttttgtgctggtcattttcttgggctcattctatctaataaatttgatcttggctgtggtggccatggcctatgaggaacagaatcaggccacattggaagaggctgaacagaaggaagctgaatttcagcagatgctcgaacagttgaaaaagcaacaagaagaagctcaggcggcagctgcagccgcatctgctgaatcaagagacttcagtggtgctggtgggataggagttttttcagagagttcttcagtagcatctaagttgagctccaaaagtgaaaaagagctgaaaaacagaagaaagaaaaagaaacagaaagaacagtctggagaagaagagaaaaatgacagagtccgaaaatcggaatctgaagacagcataagaagaaaaggtttccgtttttccttggaaggaagtaggctgacatatgaaaagagattttcttctccacaccagtccttactgagcatccgtggctcccttttctctccaagacgcaacagtagggcgagccttttcagcttcagaggtcgagcaaaggacattggctctgagaatgactttgctgatgatgagcacagcacctttgaggacaatgacagccgaagagactctctgttcgtgccgcacagacatggagaacggcgccacagcaatgtcagccaggccagccgtgcctccagggtgctccccatcctgcccatgaatgggaagatgcatagcgctgtggactgcaatggtgtggtctccctggtcgggggcccttctaccctcacatctgctgggcagctcctaccagagggcacaactactgaaacagaaataagaaagagacggtccagttcttatcatgtttccatggatttattggaagatcctacatcaaggcaaagagcaatgagtatagccagtattttgaccaacaccatggaagaacttgaagaatccagacagaaatgcccaccatgctggtataaatttgctaatatgtgtttgatttgggactgttgtaaaccatggttaaaggtgaaacaccttgtcaacctggttgtaatggacccatttgttgacctggccatcaccatctgcattgtcttaaatacactcttcatggctatggagcactatcccatgacggagcagttcagcagtgtactgtctgttggaaacctggtcttcacagggatcttcacagcagaaatgtttctcaagataattgccatggatccatattattactttcaagaaggctggaatatttttgatggttttattgtgagccttagtttaatggaacttggtttggcaaatgtggaaggattgtcagttctccgatcattccggctgctccgagttttcaagttggcaaaatcttggccaactctaaatatgctaattaagatcattggcaattctgtgggggctctaggaaacctcaccttggtattggccatcatcgtcttcatttttgctgtggtcggcatgcagctctttggtaagagctacaaagaatgtgtctgcaagatttccaatgattgtgaactcccacgctggcacatgcatgactttttccactccttcctgatcgtgttccgcgtgctgtgtggagagtggatagagaccatgtgggactgtatggaggtcgctggccaaaccatgtgccttactgtcttcatgatggtcatggtgattggaaatctagtggttctgaacctcttcttggccttgcttttgagttccttcagttctgacaatcttgctgccactgatgatgataacgaaatgaataatctccagattgctgtgggaaggatgcagaaaggaatcgattttgttaaaagaaaaatacgtgaatttattcagaaagcctttgttaggaagcagaaagctttagatgaaattaaaccgcttgaagatctaaataataaaaaagacagctgtatttccaaccataccaccatagaaataggcaaagacctcaattatctcaaagacggaaatggaactactagtggcataggcagcagtgtagaaaaatatgtcgtggatgaaagtgattacatgtcatttataaacaaccctagcctcactgtgacagtaccaattgctgttggagaatctgactttgaaaatttaaatactgaagaattcagcagcgagtcagatatggaggaaagcaaagagaagctaaatgcaactagttcatctgaaggcagcacggttgatattggagctcccgccgagggagaacagcctgaggttgaacctgaggaatcccttgaacctgaagcctgttttacagaagactgtgtacggaagttcaagtgttgtcagataagcatagaagaaggcaaagggaaactctggtggaatttgaggaaaacatgctataagatagtggagcacaattggttcgaaaccttcattgtcttcatgattctgctgagcagtggggctctggcctttgaagatatatacattgagcagcgaaaaaccattaagaccatgttagaatatgctgacaaggttttcacttacatattcattctggaaatgctgctaaagtgggttgcatatggttttcaagtgtattttaccaatgcctggtgctggctagacttcctgattgttgatgtctcactggttagcttaactgcaaatgccttgggttactcagaacttggtgccatcaaatccctcagaacactaagagctctgaggccactgagagctttgtcccggtttgaaggaatgagggttgttgtaaatgctcttttaggagccattccatctatcatgaatgtacttctggtttgtctgatcttttggctaatattcagtatcatgggagtgaatctctttgctggcaagttttaccattgtattaattacaccactggagagatgtttgatgtaagcgtggtcaacaactacagtgagtgcaaagctctcattgagagcaatcaaactgccaggtggaaaaatgtgaaagtaaactttgataacgtaggacttggatatctgtctctacttcaagtagccacgtttaagggatggatggatattatgtatgcagctgttgattcacgaaatgtagaattacaacccaagtatgaagacaacctgtacatgtatctttattttgtcatctttattatttttggttcattctttaccttgaatcttttcattggtgtcatcatagataacttcaaccaacagaaaaagaagtttggaggtcaagacatttttatgacagaagaacagaagaaatactacaatgcaatgaaaaaactgggttcaaagaaaccacaaaaacccatacctcgacctgctaacaaattccaaggaatggtctttgattttgtaaccaaacaagtctttgatatcagcatcatgatcctcatctgccttaacatggtcaccatgatggtggaaaccgatgaccagagtcaagaaatgacaaacattctgtactggattaatctggtgtttattgttctgttcactggagaatgtgtgctgaaactgatctctcttcgttactactatttcactattggatggaatatttttgattttgtggtggtcattctctccattgtaggaatgtttctggctgaactgatagaaaagtattttgtgtcccctaccctgttccgagtgatccgtcttgccaggattggccgaatcctacgtctgatcaaaggagcaaaggggatccgcacgctgctctttgctttgatgatgtcccttcctgcgttgtttaacatcggcctccttcttttcctggtcatgttcatctacgccatctttgggatgtccaattttgcctatgttaagagggaagttgggatcgatgacatgttcaactttgagacctttggcaacagcatgatctgcctgttccaaattacaacctctgctggctgggatggattgctagcacctattcttaatagtggacctccagactgtgaccctgacaaagatcaccctggaagctcagttaaaggagactgtgggaacccatctgttgggattttcttttttgtcagttacatcatcatatccttcctggttgtggtgaacatgtacatcgcggtcatcctggagaacttcagtgttgctactgaagaaagtgcagagcctctgagtgaggatgactttgagatgttctatgaggtttgggagaagtttgatcccgatgcgacccagtttatagagtttgccaaactttctgattttgcagatgccctggatcctcctcttctcatagcaaaacccaacaaagtccagctcattgccatggatctgcccatggtgagtggtgaccggatccactgtcttgacatcttatttgcttttacaaagcgtgttttgggtgagagtggagagatggatgcccttcgaatacagatggaagagcgattcatggcatcaaacccctccaaagtctcttatgagcccattacgaccacgttgaaacgcaaacaagaggaggtgtctgctattattatccagagggcttacagacgctacctcttgaagcaaaaagttaaaaaggtatcaagtatatacaagaaagacaaaggcaaagaatgtgatggaacacccatcaaagaagatactctcattgataaactgaatgagaattcaactccagagaaaaccgatatgacgccttccaccacgtctccaccctcgtatgatagtgtgaccaaaccagaaaaagaaaaatttgaaaaagacaaatcagaaaaggaagacaaagggaaagatatcagggaaagtaaaaagtaaaaagaaaccaagaattttccattttgtgatcaattgtttacagcccgtgatggtgatgtgtttgtgtcaacaggactcccacaggaggtctatgccaaactgactgtttttacaaatgtatacttaaggtcagtgcctataacaagacagagacctctggtcagcaaactggaactcagtaaactggagaaatagtatcgatgggaggtttctattttcacaaccagctgacactgctgaagagcagaggcgtaatggctactcagacgataggaaccaatttaaaggggggagggaagttaaatttttatgtaaattcaacatgtgacacttgataatagtaattgtcaccagtgtttatgttttaactgccacacctgccatatttttacaaaacgtgtgctgtgaatttatcacttttctttttaattcacaggttgtttactattatatgtgactatttttgtaaatgggtttgtgtttggggagagggattaaagggagggaattctacatttctctattgtattgtataactggatatattttaaatggaggcatgctgcaattctcattcacacataaaaaaatcacatcacaaaagggaagagtttacttcttgtttcaggatgtttttagatttttgaggtgcttaaatagctattcgtatttttaaggtgtctcatccagaaaaaatttaatgtgcctgtaaatgttccatagaatcacaagcattaaagagttgttttatttttacataacccattaaatgtacatgtatatatgtatatatgtatatgtgcgtgtatatacatatatatgtatacacacatgcacacacagagatatacacataccattacattgtcattcacagtcccagcagcatgactatcacatttttgataagtgtcctttggcataaaataaaaatatcctatcagtcctttctaagaagcctgaattgaccaaaaaacatccccaccaccactttataaagttgattctgctttatcctgcagtattgtttagccatcttctgctcttggtaaggttgacatagtatatgtcaatttaaaaaataaaagtctgctttgtaaatagtaattttacccagtggtgcatgtttgagcaaacaaaaatgatgatttaagcacactacttattgcatcaaatatgtaccacagtaagtatagtttgcaagctttcaacaggtaatatgatgtaattggttccattatagtttgaagctgtcactgctgcatgtttatcttgcctatgctgctgtatcttattccttccactgttcagaagtctaatatgggaagccatatatcagtggtaaagtgaagcaaattgttctaccaagacctcattcttcatgtcattaagcaataggttgcagcaaacaaggaagagcttcttgctttttattcttccaaccttaattgaacactcaatgatgaaaagcccgactgtacaaacatgttgcaagctgcttaaatctgtttaaaatatatggttagagttttctaagaaaatataaatactgtaaaaagttcattttattttatttttcagccttttgtacgtaaaatgagaaattaaaagtatcttcaggtggatgtcacagtcactattgttagtttctgttcctagcacttttaaattgaagcacttcacaaaataagaagcaaggactaggatgcagtgtaggtttctgcttttttattagtactgtaaacttgcacacatttcaatgtgaaacaaatctcaaactgagttcaatgtttatttgctttcaatagtaatgccttatcattgaaagaggcttaaagaaaaaaaaaatcagctgatactcttggcattgcttgaatccaatgtttccacctagtctttttattcagtaatcatcagtcttttccaatgtttgtttacacagatagatcttattgacccatatggcactagaactgtatcagatataatatgggatcccagctttttttcctctcccacaaaaccaggtagtgaagttatattaccagttacagcaaaatactttgtgtttcacaagcaacaataaatgtagattctttatactgaagctattgacttgtagtgtgttggtgaaatgcatgcaggaaaatgctgttaccataaagaacggtaaaccacattacaatcaagccaaaagaataaaggtttcgcttttgtttttgtatttaattgttgtctttgtttctatctttgaaatgccatttaaaggtagatttctatcatgtaaaaataatctatctgaaaaacaaatgtaaagaacacacattaattactataattcatctttcaattttttcatggaatggaagttaattaagaagagtgtattggataactactttaatattggccaaaaagctagatatggcatcaggtagactagtggaaagttacaaaaattaataaaaaattgactaaca

SEQ ID NO: 567 - DNA, 8604 bp, Homo sapiens
  source 1..8604: mol_type = genomic DNA
atagcagtaacacaattcacctctagtgtgaacatatcaggatggcatagaccagcactttcttatgcaaggagctaaacagtgattaaaggagcaggatgaaaagatggcacagtcagtgctggtaccgccaggacctgacagcttccgcttctttaccagggaatcccttgctgctattgaacaacgcattgcagaagagaaagctaagagacccaaacaggaacgcaaggatgaggatgatgaaaatggcccaaagccaaacagtgacttggaagcaggaaaatctcttccatttatttatggagacattcctccagagatggtgtcagtgcccctggaggatctggacccctactatatcaataagaaaacgtttatagtattgaataaagggaaagcaatctctcgattcagtgccacccctgccctttacattttaactcccttcaaccctattagaaaattagctattaagattttggtacattctttattcaatatgctcattatgtgcacgattcttaccaactgtgtatttatgaccatgagtaaccctccagactggacaaagaatgtggagtatacctttacaggaatttatacttttgaatcacttattaaaatacttgcaaggggcttttgtttagaagatttcacatttttacgggatccatggaattggttggatttcacagtcattacttttgcatatgtgacagagtttgtggacctgggcaatgtctcagcgttgagaacattcagagttctccgagcattgaaaacaatttcagtcattccaggcctgaagaccattgtgggggccctgatccagtcagtgaagaagctttctgatgtcatgatcttgactgtgttctgtctaagcgtgtttgcgctaataggattgcagttgttcatgggcaacctacgaaataaatgtttgcaatggcctccagataattcttcctttgaaataaatatcacttccttctttaacaattcattggatgggaatggtactactttcaataggacagtgagcatatttaactgggatgaatatattgaggataaaagtcacttttattttttagaggggcaaaatgatgctctgctttgtggcaacagctcagatgcaggccagtgtcctgaaggatacatctgtgtgaaggctggtagaaaccccaactatggctacacgagctttgacacctttagttgggcctttttgtccttatttcgtctcatgactcaagacttctgggaaaacctttatcaactgacactacgtgctgctgggaaaacgtacatgatattttttgtgctggtcattttcttgggctcattctatctaataaatttgatcttggctgtggtggccatggcctatgaggaacagaatcaggccacattggaagaggctgaacagaaggaagctgaatttcagcagatgctcgaacagttgaaaaagcaacaagaagaagctcaggcggcagctgcagccgcatctgctgaatcaagagacttcagtggtgctggtgggataggagttttttcagagagttcttcagtagcatctaagttgagctccaaaagtgaaaaagagctgaaaaacagaagaaagaaaaagaaacagaaagaacagtctggagaagaagagaaaaatgacagagtccgaaaatcggaatctgaagacagcataagaagaaaaggtttccgtttttccttggaaggaagtaggctgacatatgaaaagagattttcttctccacaccagtccttactgagcatccgtggctcccttttctctccaagacgcaacagtagggcgagccttttcagcttcagaggtcgagcaaaggacattggctctgagaatgactttgctgatgatgagcacagcacctttgaggacaatgacagccgaagagactctctgttcgtgccgcacagacatggagaacggcgccacagcaatgtcagccaggccagccgtgcctccagggtgctccccatcctgcccatgaatgggaagatgcatagcgctgtggactgcaatggtgtggtctccctggtcgggggcccttctaccctcacatctgctgggcagctcctaccagagggcacaactactgaaacagaaataagaaagagacggtccagttcttatcatgtttccatggatttattggaagatcctacatcaaggcaaagagcaatgagtatagccagtattttgaccaacaccatggaagaacttgaagaatccagacagaaatgcccaccatgctggtataaatttgctaatatgtgtttgatttgggactgttgtaaaccatggttaaaggtgaaacaccttgtcaacctggttgtaatggacccatttgttgacctggccatcaccatctgcattgtcttaaatacactcttcatggctatggagcactatcccatgacggagcagttcagcagtgtactgtctgttggaaacctggtcttcacagggatcttcacagcagaaatgtttctcaagataattgccatggatccatattattactttcaagaaggctggaatatttttgatggttttattgtgagccttagtttaatggaacttggtttggcaaatgtggaaggattgtcagttctccgatcattccggctgctccgagttttcaagttggcaaaatcttggccaactctaaatatgctaattaagatcattggcaattctgtgggggctctaggaaacctcaccttggtattggccatcatcgtcttcatttttgctgtggtcggcatgcagctctttggtaagagctacaaagaatgtgtctgcaagatttccaatgattgtgaactcccacgctggcacatgcatgactttttccactccttcctgatcgtgttccgcgtgctgtgtggagagtggatagagaccatgtgggactgtatggaggtcgctggccaaaccatgtgccttactgtcttcatgatggtcatggtgattggaaatctagtggttctgaacctcttcttggccttgcttttgagttccttcagttctgacaatcttgctgccactgatgatgataacgaaatgaataatctccagattgctgtgggaaggatgcagaaaggaatcgattttgttaaaagaaaaatacgtgaatttattcagaaagcctttgttaggaagcagaaagctttagatgaaattaaaccgcttgaagatctaaataataaaaaagacagctgtatttccaaccataccaccatagaaataggcaaagacctcaattatctcaaagacggaaatggaactactagtggcataggcagcagtgtagaaaaatatgtcgtggatgaaagtgattacatgtcatttataaacaaccctagcctcactgtgacagtaccaattgctgttggagaatctgactttgaaaatttaaatactgaagaattcagcagcgagtcagatatggaggaaagcaaagagaagctaaatgcaactagttcatctgaaggcagcacggttgatattggagctcccgccgagggagaacagcctgaggttgaacctgaggaatcccttgaacctgaagcctgttttacagaagactgtgtacggaagttcaagtgttgtcagataagcatagaagaaggcaaagggaaactctggtggaatttgaggaaaacatgctataagatagtggagcacaattggttcgaaaccttcattgtcttcatgattctgctgagcagtggggctctggcctttgaagatatatacattgagcagcgaaaaaccattaagaccatgttagaatatgctgacaaggttttcacttacatattcattctggaaatgctgctaaagtgggttgcatatggttttcaagtgtattttaccaatgcctggtgctggctagacttcctgattgttgatgtctcactggttagcttaactgcaaatgccttgggttactcagaacttggtgccatcaaatccctcagaacactaagagctctgaggccactgagagctttgtcccggtttgaaggaatgagggttgttgtaaatgctcttttaggagccattccatctatcatgaatgtacttctggtttgtctgatcttttggctaatattcagtatcatgggagtgaatctctttgctggcaagttttaccattgtattaattacaccactggagagatgtttgatgtaagcgtggtcaacaactacagtgagtgcaaagctctcattgagagcaatcaaactgccaggtggaaaaatgtgaaagtaaactttgataacgtaggacttggatatctgtctctacttcaagtagccacgtttaagggatggatggatattatgtatgcagctgttgattcacgaaatgtagaattacaacccaagtatgaagacaacctgtacatgtatctttattttgtcatctttattatttttggttcattctttaccttgaatcttttcattggtgtcatcatagataacttcaaccaacagaaaaagaagtttggaggtcaagacatttttatgacagaagaacagaagaaatactacaatgcaatgaaaaaactgggttcaaagaaaccacaaaaacccatacctcgacctgctaacaaattccaaggaatggtctttgattttgtaaccaaacaagtctttgatatcagcatcatgatcctcatctgccttaacatggtcaccatgatggtggaaaccgatgaccagagtcaagaaatgacaaacattctgtactggattaatctggtgtttattgttctgttcactggagaatgtgtgctgaaactgatctctcttcgttactactatttcactattggatggaatatttttgattttgtggtggtcattctctccattgtaggaatgtttctggctgaactgatagaaaagtattttgtgtcccctaccctgttccgagtgatccgtcttgccaggattggccgaatcctacgtctgatcaaaggagcaaaggggatccgcacgctgctctttgctttgatgatgtcccttcctgcgttgtttaacatcggcctccttcttttcctggtcatgttcatctacgccatctttgggatgtccaattttgcctatgttaagagggaagttgggatcgatgacatgttcaactttgagacctttggcaacagcatgatctgcctgttccaaattacaacctctgctggctgggatggattgctagcacctattcttaatagtggacctccagactgtgaccctgacaaagatcaccctggaagctcagttaaaggagactgtgggaacccatctgttgggattttcttttttgtcagttacatcatcatatccttcctggttgtggtgaacatgtacatcgcggtcatcctggagaacttcagtgttgctactgaagaaagtgcagagcctctgagtgaggatgactttgagatgttctatgaggtttgggagaagtttgatcccgatgcgacccagtttatagagtttgccaaactttctgattttgcagatgccctggatcctcctcttctcatagcaaaacccaacaaagtccagctcattgccatggatctgcccatggtgagtggtgaccggatccactgtcttgacatcttatttgcttttacaaagcgtgttttgggtgagagtggagagatggatgcccttcgaatacagatggaagagcgattcatggcatcaaacccctccaaagtctcttatgagcccattacgaccacgttgaaacgcaaacaagaggaggtgtctgctattattatccagagggcttacagacgctacctcttgaagcaaaaagttaaaaaggtatcaagtatatacaagaaagacaaaggcaaagaatgtgatggaacacccatcaaagaagatactctcattgataaactgaatgagaattcaactccagagaaaaccgatatgacgccttccaccacgtctccaccctcgtatgatagtgtgaccaaaccagaaaaagaaaaatttgaaaaagacaaatcagaaaaggaagacaaagggaaagatatcagggaaagtaaaaagtaaaaagaaaccaagaattttccattttgtgatcaattgtttacagcccgtgatggtgatgtgtttgtgtcaacaggactcccacaggaggtctatgccaaactgactgtttttacaaatgtatacttaaggtcagtgcctataacaagacagagacctctggtcagcaaactggaactcagtaaactggagaaatagtatcgatgggaggtttctattttcacaaccagctgacactgctgaagagcagaggcgtaatggctactcagacgataggaaccaatttaaaggggggagggaagttaaatttttatgtaaattcaacatgtgacacttgataatagtaattgtcaccagtgtttatgttttaactgccacacctgccatatttttacaaaacgtgtgctgtgaatttatcacttttctttttaattcacaggttgtttactattatatgtgactatttttgtaaatgggtttgtgtttggggagagggattaaagggagggaattctacatttctctattgtattgtataactggatatattttaaatggaggcatgctgcaattctcattcacacataaaaaaatcacatcacaaaagggaagagtttacttcttgtttcaggatgtttttagatttttgaggtgcttaaatagctattcgtatttttaaggtgtctcatccagaaaaaatttaatgtgcctgtaaatgttccatagaatcacaagcattaaagagttgttttatttttacataacccattaaatgtacatgtatatatgtatatatgtatatgtgcgtgtatatacatatatatgtatacacacatgcacacacagagatatacacataccattacattgtcattcacagtcccagcagcatgactatcacatttttgataagtgtcctttggcataaaataaaaatatcctatcagtcctttctaagaagcctgaattgaccaaaaaacatccccaccaccactttataaagttgattctgctttatcctgcagtattgtttagccatcttctgctcttggtaaggttgacatagtatatgtcaatttaaaaaataaaagtctgctttgtaaatagtaattttacccagtggtgcatgtttgagcaaacaaaaatgatgatttaagcacactacttattgcatcaaatatgtaccacagtaagtatagtttgcaagctttcaacaggtaatatgatgtaattggttccattatagtttgaagctgtcactgctgcatgtttatcttgcctatgctgctgtatcttattccttccactgttcagaagtctaatatgggaagccatatatcagtggtaaagtgaagcaaattgttctaccaagacctcattcttcatgtcattaagcaataggttgcagcaaacaaggaagagcttcttgctttttattcttccaaccttaattgaacactcaatgatgaaaagcccgactgtacaaacatgttgcaagctgcttaaatctgtttaaaatatatggttagagttttctaagaaaatataaatactgtaaaaagttcattttattttatttttcagccttttgtacgtaaaatgagaaattaaaagtatcttcaggtggatgtcacagtcactattgttagtttctgttcctagcacttttaaattgaagcacttcacaaaataagaagcaaggactaggatgcagtgtaggtttctgcttttttattagtactgtaaacttgcacacatttcaatgtgaaacaaatctcaaactgagttcaatgtttatttgctttcaatagtaatgccttatcattgaaagaggcttaaagaaaaaaaaaatcagctgatactcttggcattgcttgaatccaatgtttccacctagtctttttattcagtaatcatcagtcttttccaatgtttgtttacacagatagatcttattgacccatatggcactagaactgtatcagatataatatgggatcccagctttttttcctctcccacaaaaccaggtagtgaagttatattaccagttacagcaaaatactttgtgtttcacaagcaacaataaatgtagattctttatactgaagctattgacttgtagtgtgttggtgaaatgcatgcaggaaaatgctgttaccataaagaacggtaaaccacattacaatcaagccaaaagaataaaggtttcgcttttgtttttgtatttaattgttgtctttgtttctatctttgaaatgccatttaaaggtagatttctatcatgtaaaaataatctatctgaaaaacaaatgtaaagaacacacattaattactataattcatctttcaattttttcatggaatggaagttaattaagaagagtgtattggataactactttaatattggccaaaaagctagatatggcatcaggtagactagtggaaagttacaaaaattaataaaaaattgactaaca

SEQ ID NO: 568 - DNA, 8630 bp, Homo sapiens
  source 1..8630: mol_type = genomic DNA
aagcatgatggaattttagctgcagtcttcttggtgccagcttatcaatcccaaactctgggtgtaaaagattctacagggcactttcttatgcaaggagctaaacagtgattaaaggagcaggatgaaaagatggcacagtcagtgctggtaccgccaggacctgacagcttccgcttctttaccagggaatcccttgctgctattgaacaacgcattgcagaagagaaagctaagagacccaaacaggaacgcaaggatgaggatgatgaaaatggcccaaagccaaacagtgacttggaagcaggaaaatctcttccatttatttatggagacattcctccagagatggtgtcagtgcccctggaggatctggacccctactatatcaataagaaaacgtttatagtattgaataaagggaaagcaatctctcgattcagtgccacccctgccctttacattttaactcccttcaaccctattagaaaattagctattaagattttggtacattctttattcaatatgctcattatgtgcacgattcttaccaactgtgtatttatgaccatgagtaaccctccagactggacaaagaatgtggagtatacctttacaggaatttatacttttgaatcacttattaaaatacttgcaaggggcttttgtttagaagatttcacatttttacgggatccatggaattggttggatttcacagtcattacttttgcatatgtgacagagtttgtggacctgggcaatgtctcagcgttgagaacattcagagttctccgagcattgaaaacaatttcagtcattccaggcctgaagaccattgtgggggccctgatccagtcagtgaagaagctttctgatgtcatgatcttgactgtgttctgtctaagcgtgtttgcgctaataggattgcagttgttcatgggcaacctacgaaataaatgtttgcaatggcctccagataattcttcctttgaaataaatatcacttccttctttaacaattcattggatgggaatggtactactttcaataggacagtgagcatatttaactgggatgaatatattgaggataaaagtcacttttattttttagaggggcaaaatgatgctctgctttgtggcaacagctcagatgcaggccagtgtcctgaaggatacatctgtgtgaaggctggtagaaaccccaactatggctacacgagctttgacacctttagttgggcctttttgtccttatttcgtctcatgactcaagacttctgggaaaacctttatcaactgacactacgtgctgctgggaaaacgtacatgatattttttgtgctggtcattttcttgggctcattctatctaataaatttgatcttggctgtggtggccatggcctatgaggaacagaatcaggccacattggaagaggctgaacagaaggaagctgaatttcagcagatgctcgaacagttgaaaaagcaacaagaagaagctcaggcggcagctgcagccgcatctgctgaatcaagagacttcagtggtgctggtgggataggagttttttcagagagttcttcagtagcatctaagttgagctccaaaagtgaaaaagagctgaaaaacagaagaaagaaaaagaaacagaaagaacagtctggagaagaagagaaaaatgacagagtccgaaaatcggaatctgaagacagcataagaagaaaaggtttccgtttttccttggaaggaagtaggctgacatatgaaaagagattttcttctccacaccagtccttactgagcatccgtggctcccttttctctccaagacgcaacagtagggcgagccttttcagcttcagaggtcgagcaaaggacattggctctgagaatgactttgctgatgatgagcacagcacctttgaggacaatgacagccgaagagactctctgttcgtgccgcacagacatggagaacggcgccacagcaatgtcagccaggccagccgtgcctccagggtgctccccatcctgcccatgaatgggaagatgcatagcgctgtggactgcaatggtgtggtctccctggtcgggggcccttctaccctcacatctgctgggcagctcctaccagagggcacaactactgaaacagaaataagaaagagacggtccagttcttatcatgtttccatggatttattggaagatcctacatcaaggcaaagagcaatgagtatagccagtattttgaccaacaccatggaagaacttgaagaatccagacagaaatgcccaccatgctggtataaatttgctaatatgtgtttgatttgggactgttgtaaaccatggttaaaggtgaaacaccttgtcaacctggttgtaatggacccatttgttgacctggccatcaccatctgcattgtcttaaatacactcttcatggctatggagcactatcccatgacggagcagttcagcagtgtactgtctgttggaaacctggtcttcacagggatcttcacagcagaaatgtttctcaagataattgccatggatccatattattactttcaagaaggctggaatatttttgatggttttattgtgagccttagtttaatggaacttggtttggcaaatgtggaaggattgtcagttctccgatcattccggctgctccgagttttcaagttggcaaaatcttggccaactctaaatatgctaattaagatcattggcaattctgtgggggctctaggaaacctcaccttggtattggccatcatcgtcttcatttttgctgtggtcggcatgcagctctttggtaagagctacaaagaatgtgtctgcaagatttccaatgattgtgaactcccacgctggcacatgcatgactttttccactccttcctgatcgtgttccgcgtgctgtgtggagagtggatagagaccatgtgggactgtatggaggtcgctggccaaaccatgtgccttactgtcttcatgatggtcatggtgattggaaatctagtggttctgaacctcttcttggccttgcttttgagttccttcagttctgacaatcttgctgccactgatgatgataacgaaatgaataatctccagattgctgtgggaaggatgcagaaaggaatcgattttgttaaaagaaaaatacgtgaatttattcagaaagcctttgttaggaagcagaaagctttagatgaaattaaaccgcttgaagatctaaataataaaaaagacagctgtatttccaaccataccaccatagaaataggcaaagacctcaattatctcaaagacggaaatggaactactagtggcataggcagcagtgtagaaaaatatgtcgtggatgaaagtgattacatgtcatttataaacaaccctagcctcactgtgacagtaccaattgctgttggagaatctgactttgaaaatttaaatactgaagaattcagcagcgagtcagatatggaggaaagcaaagagaagctaaatgcaactagttcatctgaaggcagcacggttgatattggagctcccgccgagggagaacagcctgaggttgaacctgaggaatcccttgaacctgaagcctgttttacagaagactgtgtacggaagttcaagtgttgtcagataagcatagaagaaggcaaagggaaactctggtggaatttgaggaaaacatgctataagatagtggagcacaattggttcgaaaccttcattgtcttcatgattctgctgagcagtggggctctggcctttgaagatatatacattgagcagcgaaaaaccattaagaccatgttagaatatgctgacaaggttttcacttacatattcattctggaaatgctgctaaagtgggttgcatatggttttcaagtgtattttaccaatgcctggtgctggctagacttcctgattgttgatgtctcactggttagcttaactgcaaatgccttgggttactcagaacttggtgccatcaaatccctcagaacactaagagctctgaggccactgagagctttgtcccggtttgaaggaatgagggttgttgtaaatgctcttttaggagccattccatctatcatgaatgtacttctggtttgtctgatcttttggctaatattcagtatcatgggagtgaatctctttgctggcaagttttaccattgtattaattacaccactggagagatgtttgatgtaagcgtggtcaacaactacagtgagtgcaaagctctcattgagagcaatcaaactgccaggtggaaaaatgtgaaagtaaactttgataacgtaggacttggatatctgtctctacttcaagtagccacgtttaagggatggatggatattatgtatgcagctgttgattcacgaaatgtagaattacaacccaagtatgaagacaacctgtacatgtatctttattttgtcatctttattatttttggttcattctttaccttgaatcttttcattggtgtcatcatagataacttcaaccaacagaaaaagaagtttggaggtcaagacatttttatgacagaagaacagaagaaatactacaatgcaatgaaaaaactgggttcaaagaaaccacaaaaacccatacctcgacctgctaacaaattccaaggaatggtctttgattttgtaaccaaacaagtctttgatatcagcatcatgatcctcatctgccttaacatggtcaccatgatggtggaaaccgatgaccagagtcaagaaatgacaaacattctgtactggattaatctggtgtttattgttctgttcactggagaatgtgtgctgaaactgatctctcttcgttactactatttcactattggatggaatatttttgattttgtggtggtcattctctccattgtaggaatgtttctggctgaactgatagaaaagtattttgtgtcccctaccctgttccgagtgatccgtcttgccaggattggccgaatcctacgtctgatcaaaggagcaaaggggatccgcacgctgctctttgctttgatgatgtcccttcctgcgttgtttaacatcggcctccttcttttcctggtcatgttcatctacgccatctttgggatgtccaattttgcctatgttaagagggaagttgggatcgatgacatgttcaactttgagacctttggcaacagcatgatctgcctgttccaaattacaacctctgctggctgggatggattgctagcacctattcttaatagtggacctccagactgtgaccctgacaaagatcaccctggaagctcagttaaaggagactgtgggaacccatctgttgggattttcttttttgtcagttacatcatcatatccttcctggttgtggtgaacatgtacatcgcggtcatcctggagaacttcagtgttgctactgaagaaagtgcagagcctctgagtgaggatgactttgagatgttctatgaggtttgggagaagtttgatcccgatgcgacccagtttatagagtttgccaaactttctgattttgcagatgccctggatcctcctcttctcatagcaaaacccaacaaagtccagctcattgccatggatctgcccatggtgagtggtgaccggatccactgtcttgacatcttatttgcttttacaaagcgtgttttgggtgagagtggagagatggatgcccttcgaatacagatggaagagcgattcatggcatcaaacccctccaaagtctcttatgagcccattacgaccacgttgaaacgcaaacaagaggaggtgtctgctattattatccagagggcttacagacgctacctcttgaagcaaaaagttaaaaaggtatcaagtatatacaagaaagacaaaggcaaagaatgtgatggaacacccatcaaagaagatactctcattgataaactgaatgagaattcaactccagagaaaaccgatatgacgccttccaccacgtctccaccctcgtatgatagtgtgaccaaaccagaaaaagaaaaatttgaaaaagacaaatcagaaaaggaagacaaagggaaagatatcagggaaagtaaaaagtaaaaagaaaccaagaattttccattttgtgatcaattgtttacagcccgtgatggtgatgtgtttgtgtcaacaggactcccacaggaggtctatgccaaactgactgtttttacaaatgtatacttaaggtcagtgcctataacaagacagagacctctggtcagcaaactggaactcagtaaactggagaaatagtatcgatgggaggtttctattttcacaaccagctgacactgctgaagagcagaggcgtaatggctactcagacgataggaaccaatttaaaggggggagggaagttaaatttttatgtaaattcaacatgtgacacttgataatagtaattgtcaccagtgtttatgttttaactgccacacctgccatatttttacaaaacgtgtgctgtgaatttatcacttttctttttaattcacaggttgtttactattatatgtgactatttttgtaaatgggtttgtgtttggggagagggattaaagggagggaattctacatttctctattgtattgtataactggatatattttaaatggaggcatgctgcaattctcattcacacataaaaaaatcacatcacaaaagggaagagtttacttcttgtttcaggatgtttttagatttttgaggtgcttaaatagctattcgtatttttaaggtgtctcatccagaaaaaatttaatgtgcctgtaaatgttccatagaatcacaagcattaaagagttgttttatttttacataacccattaaatgtacatgtatatatgtatatatgtatatgtgcgtgtatatacatatatatgtatacacacatgcacacacagagatatacacataccattacattgtcattcacagtcccagcagcatgactatcacatttttgataagtgtcctttggcataaaataaaaatatcctatcagtcctttctaagaagcctgaattgaccaaaaaacatccccaccaccactttataaagttgattctgctttatcctgcagtattgtttagccatcttctgctcttggtaaggttgacatagtatatgtcaatttaaaaaataaaagtctgctttgtaaatagtaattttacccagtggtgcatgtttgagcaaacaaaaatgatgatttaagcacactacttattgcatcaaatatgtaccacagtaagtatagtttgcaagctttcaacaggtaatatgatgtaattggttccattatagtttgaagctgtcactgctgcatgtttatcttgcctatgctgctgtatcttattccttccactgttcagaagtctaatatgggaagccatatatcagtggtaaagtgaagcaaattgttctaccaagacctcattcttcatgtcattaagcaataggttgcagcaaacaaggaagagcttcttgctttttattcttccaaccttaattgaacactcaatgatgaaaagcccgactgtacaaacatgttgcaagctgcttaaatctgtttaaaatatatggttagagttttctaagaaaatataaatactgtaaaaagttcattttattttatttttcagccttttgtacgtaaaatgagaaattaaaagtatcttcaggtggatgtcacagtcactattgttagtttctgttcctagcacttttaaattgaagcacttcacaaaataagaagcaaggactaggatgcagtgtaggtttctgcttttttattagtactgtaaacttgcacacatttcaatgtgaaacaaatctcaaactgagttcaatgtttatttgctttcaatagtaatgccttatcattgaaagaggcttaaagaaaaaaaaaatcagctgatactcttggcattgcttgaatccaatgtttccacctagtctttttattcagtaatcatcagtcttttccaatgtttgtttacacagatagatcttattgacccatatggcactagaactgtatcagatataatatgggatcccagctttttttcctctcccacaaaaccaggtagtgaagttatattaccagttacagcaaaatactttgtgtttcacaagcaacaataaatgtagattctttatactgaagctattgacttgtagtgtgttggtgaaatgcatgcaggaaaatgctgttaccataaagaacggtaaaccacattacaatcaagccaaaagaataaaggtttcgcttttgtttttgtatttaattgttgtctttgtttctatctttgaaatgccatttaaaggtagatttctatcatgtaaaaataatctatctgaaaaacaaatgtaaagaacacacattaattactataattcatctttcaattttttcatggaatggaagttaattaagaagagtgtattggataactactttaatattggccaaaaagctagatatggcatcaggtagactagtggaaagttacaaaaattaataaaaaattgactaaca

SEQ ID NO: 569 - DNA, 11559 bp, Homo sapiens
  source 1..11559: mol_type = genomic DNA
ggggagcgctccaagatggcgcccaccgcagtcccgcccgccgcatcctcggcgcctttgcagtccggccgcgcctcccgggccccgcgttagggccgccgctgcctccctcgccgccgccgctgccagctgacctgtcctggacgcagcataactaacgaagctgctgcaggatgagaagatggcagcgcggctgcttgcaccaccaggccctgatagtttcaagcctttcacccctgagtcactggcaaacattgagaggcgcattgctgagagcaagctcaagaaaccaccaaaggccgatggcagtcatcgggaggacgatgaggacagcaagcccaagccaaacagcgacctggaagcagggaagagtttgcctttcatctacggggacatcccccaaggcctggttgcagttcccctggaggactttgacccatactatttgacgcagaaaacctttgtagtattaaacagagggaaaactctcttcagatttagtgccacgcctgccttgtacattttaagtccttttaacctgataagaagaatagctattaaaattttgatacattcagtatttagcatgatcattatgtgcactattttgaccaactgtgtattcatgacttttagtaaccctcctgactggtcgaagaatgtggagtacacgttcacagggatttatacatttgaatcactagtgaaaatcattgcaagaggtttctgcatagatggctttacctttttacgggacccatggaactggttagatttcagtgtcatcatgatggcgtatataacagagtttgtaaacctaggcaatgtttcagctctacgcactttcagggtactgagggctttgaaaactatttcggtaatcccaggcctgaagacaattgtgggtgccctgattcagtctgtgaagaaactgtcagatgtgatgatcctgacagtgttctgcctgagtgtttttgccttgatcggactgcagctgttcatggggaaccttcgaaacaagtgtgttgtgtggcccataaacttcaacgagagctatcttgaaaatggcaccaaaggctttgattgggaagagtatatcaacaataaaacaaatttctacacagttcctggcatgctggaacctttactctgtgggaacagttctgatgctgggcaatgcccagagggataccagtgtatgaaagcaggaaggaaccccaactatggttacacaagttttgacacttttagctgggccttcttggcattatttcgccttatgacccaggactattgggaaaacttgtatcaattgactttacgagcagccgggaaaacatacatgatcttcttcgtcttggtcatctttgtgggttctttctatctggtgaacttgatcttggctgtggtggccatggcttatgaagaacagaatcaggcaacactggaggaggcagaacaaaaagaggctgaatttaaagcaatgttggagcaacttaagaagcaacaggaagaggcacaggctgctgcgatggccacttcagcaggaactgtctcagaagatgccatagaggaagaaggtgaagaaggagggggctcccctcggagctcttctgaaatctctaaactcagctcaaagagtgcaaaggaaagacgtaacaggagaaagaagaggaagcaaaaggaactctctgaaggagaggagaaaggggatcccgagaaggtgtttaagtcagagtcagaagatggcatgagaaggaaggcctttcggctgccagacaacagaatagggaggaaattttccatcatgaatcagtcactgctcagcatcccaggctcgcccttcctctcccgccacaacagcaagagcagcatcttcagtttcaggggacctgggcggttccgagacccgggctccgagaatgagttcgcggatgacgagcacagcacggtggaggagagcgagggccgccgggactccctcttcatccccatccgggcccgcgagcgccggagcagctacagcggctacagcggctacagccagggcagccgctcctcgcgcatcttccccagcctgcggcgcagcgtgaagcgcaacagcacggtggactgcaacggcgtggtgtccctcatcggcggccccggctcccacatcggcgggcgtctcctgccagaggctacaactgaggtggaaattaagaagaaaggccctggatctcttttagtttccatggaccaattagcctcctacgggcggaaggacagaatcaacagtataatgagtgttgttacaaatacactagtagaagaactggaagagtctcagagaaagtgcccgccatgctggtataaatttgccaacactttcctcatctgggagtgccacccctactggataaaactgaaagagattgtgaacttgatagttatggacccttttgtggatttagccatcaccatctgcatcgtcctgaatacactgtttatggcaatggagcaccatcctatgacaccacaatttgaacatgtcttggctgtaggaaatctggttttcactggaattttcacagcggaaatgttcctgaagctcatagccatggatccctactattatttccaagaaggttggaacatttttgacggatttattgtctccctcagtttaatggaactgagtctagcagacgtggaggggctttcagtgctgcgatctttccgattgctccgagtcttcaaattggccaaatcctggcccaccctgaacatgctaatcaagattattggaaattcagtgggtgccctgggcaacctgacactggtgctggccattattgtcttcatctttgccgtggtggggatgcaactctttggaaaaagctacaaagagtgtgtctgcaagatcaaccaggactgtgaactccctcgctggcatatgcatgactttttccattccttcctcattgtctttcgagtgttgtgcggggagtggattgagaccatgtgggactgcatggaagtggcaggccaggccatgtgcctcattgtctttatgatggtcatggtgattggcaacttggtggtgctgaacctgtttctggccttgctcctgagctccttcagtgcagacaacctggctgccacagatgacgatggggaaatgaacaacctccagatctcagtgatccgtatcaagaagggtgtggcctggaccaaactaaaggtgcacgccttcatgcaggcccactttaagcagcgtgaggctgatgaggtgaagcctctggatgagttgtatgaaaagaaggccaactgtatcgccaatcacaccggtgcagacatccaccggaatggtgacttccagaagaatggcaatggcacaaccagcggcattggcagcagcgtggagaagtacatcattgatgaggaccacatgtccttcatcaacaaccccaacttgactgtacgggtacccattgctgtgggcgagtctgactttgagaacctcaacacagaggatgttagcagcgagtcggatcctgaaggcagcaaagataaactagatgacaccagctcctctgaaggaagcaccattgatatcaaaccagaagtagaagaggtccctgtggaacagcctgaggaatacttggatccagatgcctgcttcacagaaggttgtgtccagcggttcaagtgctgccaggtcaacatcgaggaagggctaggcaagtcttggtggatcctgcggaaaacctgcttcctcatcgtggagcacaactggtttgagaccttcatcatcttcatgattctgctgagcagtggcgccctggccttcgaggacatctacattgagcagagaaagaccatccgcaccatcctggaatatgctgacaaagtcttcacctatatcttcatcctggagatgttgctcaagtggacagcctatggcttcgtcaagttcttcaccaatgcctggtgttggctggacttcctcattgtggctgtctctttagtcagccttatagctaatgccctgggctactcggaactaggtgccataaagtcccttaggaccctaagagctttgagacccttaagagccttatcacgatttgaagggatgagggtggtggtgaatgccttggtgggcgccatcccctccatcatgaatgtgctgctggtgtgtctcatcttctggctgattttcagcatcatgggagttaacttgtttgcgggaaagtaccactactgctttaatgagacttctgaaatccgatttgaaattgaagatgtcaacaataaaactgaatgtgaaaagcttatggaggggaacaatacagagatcagatggaagaacgtgaagatcaactttgacaatgttggggcaggatacctggcccttcttcaagtagcaaccttcaaaggctggatggacatcatgtatgcagctgtagattcccggaagcctgatgagcagcctaagtatgaggacaatatctacatgtacatctattttgtcatcttcatcatcttcggctccttcttcaccctgaacctgttcattggtgtcatcattgataacttcaatcaacaaaagaaaaagttcggaggtcaggacatcttcatgaccgaagaacagaagaagtactacaatgccatgaaaaagctgggctcaaagaagccacagaaacctattccccgccccttgaacaaaatccaaggaatcgtctttgattttgtcactcagcaagcctttgacattgttatcatgatgctcatctgccttaacatggtgacaatgatggtggagacagacactcaaagcaagcagatggagaacatcctctactggattaacctggtgtttgttatcttcttcacctgtgagtgtgtgctcaaaatgtttgcgttgaggcactactacttcaccattggctggaacatcttcgacttcgtggtagtcatcctctccattgtgggaatgttcctggcagatataattgagaaatactttgtttccccaaccctattccgagtcatccgattggcccgtattgggcgcatcttgcgtctgatcaaaggcgccaaagggattcgtaccctgctctttgccttaatgatgtccttgcctgccctgttcaacatcggccttctgctcttcctggtcatgttcatcttctccatttttgggatgtccaattttgcatatgtgaagcacgaggctggtatcgatgacatgttcaactttgagacatttggcaacagcatgatctgcctgtttcaaatcacaacctcagctggttgggatggcctgctgctgcccatcctaaaccgcccccctgactgcagcctagataaggaacacccagggagtggctttaagggagattgtgggaacccctcagtgggcatcttcttctttgtaagctacatcatcatctctttcctaattgtcgtgaacatgtacattgccatcatcctggagaacttcagtgtagccacagaggaaagtgcagaccctctgagtgaggatgactttgagaccttctatgagatctgggagaagttcgaccccgatgccacccagttcattgagtactgtaagctggcagactttgcagatgccttggagcatcctctccgagtgcccaagcccaataccattgagctcatcgctatggatctgccaatggtgagcggggatcgcatccactgcttggacatcctttttgccttcaccaagcgggtcctgggagatagcggggagttggacatcctgcggcagcagatggaagagcggttcgtggcatccaatccttccaaagtgtcttacgagccaatcacaaccacactgcgtcgcaagcaggaggaggtatctgcagtggtcctgcagcgtgcctaccggggacatttggcaaggcggggcttcatctgcaaaaagacaacttctaataagctggagaatggaggcacacaccgggagaaaaaagagagcaccccatctacagcctccctcccgtcctatgacagtgtaactaaacctgaaaaggagaaacagcagcgggcagaggaaggaagaagggaaagagccaaaagacaaaaagaggtcagagaatccaagtgttagaggagaacaaaaattcagtattatacagatctaaaactcgcaagtgaaagattgtttacaaacttcctgaatattatcaatgcagaacagctgtggagactctaacctgaagatctataccaaacgtcgtctgcttaccacgtaacacagctgcatcttgagcagtgacctgccaagggcaaaggaccccgctccctagacttacagattttctaatgcttgggcaggtggttactgcatgttccacatcagtcaatgcaacttaggacaaaactaaccagatacagaaacagaagagaggctgccgggaccagcatatttccgttgcagccaaatggattttattttttcattttattgattctcagaagcagaaagcatcactttaaaagttcgtttgttcatgcaaactatatttgcattcttacattagttaagctaagcagcaaaaagaaaacacacacacacactcacatttagcccatgtcatttaattgtcagtttctttgacataaagcgcatcttctccacatgggcttcacgtggtttggagatgggtgggggaaaacaatcaggtttcttcaggctgaggaggacttgctcaggccgattccaaacattgtgctcgttcaatgcgtagaaatgatttgcatgatggcatgccgtgatcagaagtcatgcatgagatccatacaccacaggacactactaatctagtcccttgcactgggtcagcctttggacaggacccagccctgcaccgttcactgtatttggagaaaatggtaagagttccataccggctacaattctttgagttcttaaaagtccttcatacaccttctgggtagggaaacaaccaactaattgactaacaccaccaacaacaaaaaacaaacccaatccaacaagcagatggatccgttgcgtgtatatgtttaacagacatctctaacatacagccattgttgcacattttgcaagatgaactatttaatgctgctctgtgtccagtacatgggggagactttgatcccaaatggcttgtactatttatgtcactgtaaaaccaaatcctagggctaaaaaaaaaattcatttgtatcttgcaatatttatgacgatcgtttagccttcatactggagaattgacacttatttggggtagagataaaagtgcttttcaaagtagcaccagttatctctaggggtaatttggggaacttaaaatgacctttcattgggagttatggggtgctcatttcatttcgtatcatgtcctctgcattgtggctttctccaggcatgggtcgataccgcgaggggttcagatattctgaactgacctctctcttctgcagaggggtcatcgcatactcacacactgcatggctccccctgcctccatcacatttctccactgagcagggcttcccttgcccacagaggtgggtgagggtagcagcattggggttacggctgtggtttctttcacttattattagaataatagtcactggtgagacctgaggtagagatggagccgcctctgaaccaagcccacttggtttctttactgcactggttttcatgagaaagcaatttaatattaattctttaggatgttccagcttccctcagtgcattcccttgcagccagttttgctatctgcttagcgacctgcccattgtcattgaagtgtggcttctgggggagcgtcatatcttccattccatctcctgctttaggaaagacagtttttagtccaggggtttctcacctaatgactggatttcaaagccaagatgctgcagttgaatgtgtcaggaagtctctatacaaagagtgaaaagagactttagcatgtgaaccaaatccaaataaattcttcctgaaccatacactagagggggaagaagaaccaacccataatcagacacaccgatctgccttgcagtagaagcactttgaaggtaatttcacagtccaccagactagttttgcatagaacaaaccacagtaagtcggcaagcagagctttctatcttgttggaccactagaaactgtccagctctcttaagcctgcttctgcagcagcatccgtagaatttttgtactacacccaataccagactgggaaggcctatctttcagtgaccctgctaactgctaggatgaatgtatagtaacatgtacaggctacattgtaaacagcacaaaacagaagctgacatgtgtggttattctttttaagagaattataaatactgtaatatataattttattttattggcatgcctttttgtaaatacaaattattaacttattaaataggaaatggcttctggcttatgccattgtcatgtttatttttattttttatacttttctttcttcttagaacttagatgctgtcagccaatgtacatccccaaaccagacagacagacaaaaaattttttattgctaatggtcttttccaaaacaacaaaaaatatatatttttgttccaatgtgcaataaattctaaccacgtctatgcaagatttggctaaacttaataattgttcttaggtcttgagatgggcaacagagctgtaagatcccgccaagtacaccatgtgctcatgctagtgatgtcattaagctactagggcatagtgatgagatttttctgagatctaaccgtttccctccgctagctcctgaccccagcccagcaggctgtctcctcagtaacacatgggccttggtatctggcacccatcagccagcctcataggaaagaagccacctccgctgtatttgaagtttcactttttaaaaaaaaaatgtttcccacctttttatccttcacccactgtccttccacctgctcactcactcactctctcacccatcctgctccacacttctttggtagtaaatgacaccatcaccagcagtttacacccgcagttaacaggcatcgaactgaaagaatcagtgatgacgtttttgtgcatcttcgctgagtgggtaagtggcaatgctttgccaaatattaacgaagccaatcaaagagcagcgcagccacagtatcactgcacatatatatatagatatataaatataatataaatatttattttttgtagccaggtccttggtgcagtatttatactccacaatccaccttttaaaaaaaggacaaaaagcaaaaagatgtgtgatgctgttaataatttaaaatgcagagccaaagccactgagcagcagctgacatggttgctggtttgtgtgtgaaaaacattttccccctcttctttccttaacctccttgttgcttaggatgaggagactctgtaatttaaagcagaggacgagaggaggaagaaacttccatgttaacatggcctactctcactcctttctaaacgagccacttttggcgtcagaagttgactggagagagataaacaaactcccagtcaaagcccctaaagcgacagtgcccagagttcttttattttttgctgcaaccaacgtaaacctgtaaaagaccaacagtgaagattagtgtattagtgaatgcatggaggccaatgctgccctaatgagacgtgataaaaagtccatcactcctctaagccaaaaggaaacaaaataaaaatgaccctttttactgtacaagggaagcctgtcttggtgtgtttgttgcttgactatcccaattcttgagtcctgggaggggtctgggaattgggaccttagcacatttggggaaaggaggggaatagagggaagagaaatcaaaggggctctcgcaaagttctggctaagaaggagagattggaagaaaagcaaggtcctgaccccccccagatccccactcacccattgcatgtggcattccccactactggccggtgcttagaggcccataaaacctctcttcacctaatccacctggcagagccctcagagatgacgtcagccaacccagctggactggccttacttctgcctttttcacctgtatgttaaaaaacaaaaacaaaaaaaccctatccctgtgccccaaagctagggcatgtgcgatgcccaacagcctccactctgcaagctcatactgggccctgccctccatcgccccagacaggcccacagacgagggctggtctccttcacatttgtgtgggggtgggggcacgcttcctcttccttctctccctgtccccctttggggacatccctctctaggcctaggccatgtctcctggttcaggaacactctctcaggaggatctcgaagtgcccactctagtccgctccagtagctccactctggagcgagatggctggtaggtcagtccccatcctcctcccctcggcccccagcctccaggcctgctgtggaggtgagatcgccatgggtcatgactttgtgacttgagtcctgggcatcttctgtaatgatgcctctttcttttctcagatgttgcccacagtttagcaaaaagcttcgttcattttcaggtactccccaccccctaaagaattggctgcaacttgccagccagggggacatcaggagagaagaggaagtctgggttgggaggggcccaagttttgcaacagagtttccattgttcagctctgtgctttcttggattccctttccaagattaccaagatttcctccattaaaactcctgaggcaccccctgcccctgccccccactgctgtttgctgtacatagaggctaagtggggtggggtgggtgggtgtgcacatgtggtgtgtgtgtgtgtgtgtgaagaatgtatataggtaaaggggagtgtggtccagtggttccagaaaagggacagaactgtgttctgtccctagcttgaccgctggctcgctgtgtggccttgggcaagtcacttaacctctctgtgcctcagtttccccatctgtaaaatggggataataatactgacctacctcacaggggtgttgtgaggctttaactaaatgttttgtaaagcgttttgagatacagaggcaaaggcgctagggaagggcaaagtattattggacttaaggaagctgaaatggtaccataaatgctgctattctgagagccattttaaactgcactgctccaaccacccccgcttctcatcaccaggacagcaggtcgagaaaatgtctttcctttcacttgcttctggggtttgtgattattcaagacaattttttccccttgctgtatctccttccctcacctcctcgacttgttccctgttctgtttatgcggaaatggcagaaatgcttgagaaatgagaatgtgtaagtggattggaagtttatagtatgaaatttcaattttactttgtactgtacatctttttactttagaatttgcaataaagggttacgtcaatcttgttttcaactctc

SEQ ID NO: 570 - DNA, 11559 bp, Homo sapiens
  source 1..11559: mol_type = genomic DNA
ggggagcgctccaagatggcgcccaccgcagtcccgcccgccgcatcctcggcgcctttgcagtccggccgcgcctcccgggccccgcgttagggccgccgctgcctccctcgccgccgccgctgccagctgacctgtcctggacgcagcataactaacgaagctgctgcaggatgagaagatggcagcgcggctgcttgcaccaccaggccctgatagtttcaagcctttcacccctgagtcactggcaaacattgagaggcgcattgctgagagcaagctcaagaaaccaccaaaggccgatggcagtcatcgggaggacgatgaggacagcaagcccaagccaaacagcgacctggaagcagggaagagtttgcctttcatctacggggacatcccccaaggcctggttgcagttcccctggaggactttgacccatactatttgacgcagaaaacctttgtagtattaaacagagggaaaactctcttcagatttagtgccacgcctgccttgtacattttaagtccttttaacctgataagaagaatagctattaaaattttgatacattcagtatttagcatgatcattatgtgcactattttgaccaactgtgtattcatgacttttagtaaccctcctgactggtcgaagaatgtggagtacacgttcacagggatttatacatttgaatcactagtgaaaatcattgcaagaggtttctgcatagatggctttacctttttacgggacccatggaactggttagatttcagtgtcatcatgatggcatatgtgacagagtttgtggacctgggcaatgtctcagcgctgagaacattcagggttctccgagctttgaaaactatctctgtaattccaggcctgaagacaattgtgggtgccctgattcagtctgtgaagaaactgtcagatgtgatgatcctgacagtgttctgcctgagtgtttttgccttgatcggactgcagctgttcatggggaaccttcgaaacaagtgtgttgtgtggcccataaacttcaacgagagctatcttgaaaatggcaccaaaggctttgattgggaagagtatatcaacaataaaacaaatttctacacagttcctggcatgctggaacctttactctgtgggaacagttctgatgctgggcaatgcccagagggataccagtgtatgaaagcaggaaggaaccccaactatggttacacaagttttgacacttttagctgggccttcttggcattatttcgccttatgacccaggactattgggaaaacttgtatcaattgactttacgagcagccgggaaaacatacatgatcttcttcgtcttggtcatctttgtgggttctttctatctggtgaacttgatcttggctgtggtggccatggcttatgaagaacagaatcaggcaacactggaggaggcagaacaaaaagaggctgaatttaaagcaatgttggagcaacttaagaagcaacaggaagaggcacaggctgctgcgatggccacttcagcaggaactgtctcagaagatgccatagaggaagaaggtgaagaaggagggggctcccctcggagctcttctgaaatctctaaactcagctcaaagagtgcaaaggaaagacgtaacaggagaaagaagaggaagcaaaaggaactctctgaaggagaggagaaaggggatcccgagaaggtgtttaagtcagagtcagaagatggcatgagaaggaaggcctttcggctgccagacaacagaatagggaggaaattttccatcatgaatcagtcactgctcagcatcccaggctcgcccttcctctcccgccacaacagcaagagcagcatcttcagtttcaggggacctgggcggttccgagacccgggctccgagaatgagttcgcggatgacgagcacagcacggtggaggagagcgagggccgccgggactccctcttcatccccatccgggcccgcgagcgccggagcagctacagcggctacagcggctacagccagggcagccgctcctcgcgcatcttccccagcctgcggcgcagcgtgaagcgcaacagcacggtggactgcaacggcgtggtgtccctcatcggcggccccggctcccacatcggcgggcgtctcctgccagaggctacaactgaggtggaaattaagaagaaaggccctggatctcttttagtttccatggaccaattagcctcctacgggcggaaggacagaatcaacagtataatgagtgttgttacaaatacactagtagaagaactggaagagtctcagagaaagtgcccgccatgctggtataaatttgccaacactttcctcatctgggagtgccacccctactggataaaactgaaagagattgtgaacttgatagttatggacccttttgtggatttagccatcaccatctgcatcgtcctgaatacactgtttatggcaatggagcaccatcctatgacaccacaatttgaacatgtcttggctgtaggaaatctggttttcactggaattttcacagcggaaatgttcctgaagctcatagccatggatccctactattatttccaagaaggttggaacatttttgacggatttattgtctccctcagtttaatggaactgagtctagcagacgtggaggggctttcagtgctgcgatctttccgattgctccgagtcttcaaattggccaaatcctggcccaccctgaacatgctaatcaagattattggaaattcagtgggtgccctgggcaacctgacactggtgctggccattattgtcttcatctttgccgtggtggggatgcaactctttggaaaaagctacaaagagtgtgtctgcaagatcaaccaggactgtgaactccctcgctggcatatgcatgactttttccattccttcctcattgtctttcgagtgttgtgcggggagtggattgagaccatgtgggactgcatggaagtggcaggccaggccatgtgcctcattgtctttatgatggtcatggtgattggcaacttggtggtgctgaacctgtttctggccttgctcctgagctccttcagtgcagacaacctggctgccacagatgacgatggggaaatgaacaacctccagatctcagtgatccgtatcaagaagggtgtggcctggaccaaactaaaggtgcacgccttcatgcaggcccactttaagcagcgtgaggctgatgaggtgaagcctctggatgagttgtatgaaaagaaggccaactgtatcgccaatcacaccggtgcagacatccaccggaatggtgacttccagaagaatggcaatggcacaaccagcggcattggcagcagcgtggagaagtacatcattgatgaggaccacatgtccttcatcaacaaccccaacttgactgtacgggtacccattgctgtgggcgagtctgactttgagaacctcaacacagaggatgttagcagcgagtcggatcctgaaggcagcaaagataaactagatgacaccagctcctctgaaggaagcaccattgatatcaaaccagaagtagaagaggtccctgtggaacagcctgaggaatacttggatccagatgcctgcttcacagaaggttgtgtccagcggttcaagtgctgccaggtcaacatcgaggaagggctaggcaagtcttggtggatcctgcggaaaacctgcttcctcatcgtggagcacaactggtttgagaccttcatcatcttcatgattctgctgagcagtggcgccctggccttcgaggacatctacattgagcagagaaagaccatccgcaccatcctggaatatgctgacaaagtcttcacctatatcttcatcctggagatgttgctcaagtggacagcctatggcttcgtcaagttcttcaccaatgcctggtgttggctggacttcctcattgtggctgtctctttagtcagccttatagctaatgccctgggctactcggaactaggtgccataaagtcccttaggaccctaagagctttgagacccttaagagccttatcacgatttgaagggatgagggtggtggtgaatgccttggtgggcgccatcccctccatcatgaatgtgctgctggtgtgtctcatcttctggctgattttcagcatcatgggagttaacttgtttgcgggaaagtaccactactgctttaatgagacttctgaaatccgatttgaaattgaagatgtcaacaataaaactgaatgtgaaaagcttatggaggggaacaatacagagatcagatggaagaacgtgaagatcaactttgacaatgttggggcaggatacctggcccttcttcaagtagcaaccttcaaaggctggatggacatcatgtatgcagctgtagattcccggaagcctgatgagcagcctaagtatgaggacaatatctacatgtacatctattttgtcatcttcatcatcttcggctccttcttcaccctgaacctgttcattggtgtcatcattgataacttcaatcaacaaaagaaaaagttcggaggtcaggacatcttcatgaccgaagaacagaagaagtactacaatgccatgaaaaagctgggctcaaagaagccacagaaacctattccccgccccttgaacaaaatccaaggaatcgtctttgattttgtcactcagcaagcctttgacattgttatcatgatgctcatctgccttaacatggtgacaatgatggtggagacagacactcaaagcaagcagatggagaacatcctctactggattaacctggtgtttgttatcttcttcacctgtgagtgtgtgctcaaaatgtttgcgttgaggcactactacttcaccattggctggaacatcttcgacttcgtggtagtcatcctctccattgtgggaatgttcctggcagatataattgagaaatactttgtttccccaaccctattccgagtcatccgattggcccgtattgggcgcatcttgcgtctgatcaaaggcgccaaagggattcgtaccctgctctttgccttaatgatgtccttgcctgccctgttcaacatcggccttctgctcttcctggtcatgttcatcttctccatttttgggatgtccaattttgcatatgtgaagcacgaggctggtatcgatgacatgttcaactttgagacatttggcaacagcatgatctgcctgtttcaaatcacaacctcagctggttgggatggcctgctgctgcccatcctaaaccgcccccctgactgcagcctagataaggaacacccagggagtggctttaagggagattgtgggaacccctcagtgggcatcttcttctttgtaagctacatcatcatctctttcctaattgtcgtgaacatgtacattgccatcatcctggagaacttcagtgtagccacagaggaaagtgcagaccctctgagtgaggatgactttgagaccttctatgagatctgggagaagttcgaccccgatgccacccagttcattgagtactgtaagctggcagactttgcagatgccttggagcatcctctccgagtgcccaagcccaataccattgagctcatcgctatggatctgccaatggtgagcggggatcgcatccactgcttggacatcctttttgccttcaccaagcgggtcctgggagatagcggggagttggacatcctgcggcagcagatggaagagcggttcgtggcatccaatccttccaaagtgtcttacgagccaatcacaaccacactgcgtcgcaagcaggaggaggtatctgcagtggtcctgcagcgtgcctaccggggacatttggcaaggcggggcttcatctgcaaaaagacaacttctaataagctggagaatggaggcacacaccgggagaaaaaagagagcaccccatctacagcctccctcccgtcctatgacagtgtaactaaacctgaaaaggagaaacagcagcgggcagaggaaggaagaagggaaagagccaaaagacaaaaagaggtcagagaatccaagtgttagaggagaacaaaaattcagtattatacagatctaaaactcgcaagtgaaagattgtttacaaacttcctgaatattatcaatgcagaacagctgtggagactctaacctgaagatctataccaaacgtcgtctgcttaccacgtaacacagctgcatcttgagcagtgacctgccaagggcaaaggaccccgctccctagacttacagattttctaatgcttgggcaggtggttactgcatgttccacatcagtcaatgcaacttaggacaaaactaaccagatacagaaacagaagagaggctgccgggaccagcatatttccgttgcagccaaatggattttattttttcattttattgattctcagaagcagaaagcatcactttaaaagttcgtttgttcatgcaaactatatttgcattcttacattagttaagctaagcagcaaaaagaaaacacacacacacactcacatttagcccatgtcatttaattgtcagtttctttgacataaagcgcatcttctccacatgggcttcacgtggtttggagatgggtgggggaaaacaatcaggtttcttcaggctgaggaggacttgctcaggccgattccaaacattgtgctcgttcaatgcgtagaaatgatttgcatgatggcatgccgtgatcagaagtcatgcatgagatccatacaccacaggacactactaatctagtcccttgcactgggtcagcctttggacaggacccagccctgcaccgttcactgtatttggagaaaatggtaagagttccataccggctacaattctttgagttcttaaaagtccttcatacaccttctgggtagggaaacaaccaactaattgactaacaccaccaacaacaaaaaacaaacccaatccaacaagcagatggatccgttgcgtgtatatgtttaacagacatctctaacatacagccattgttgcacattttgcaagatgaactatttaatgctgctctgtgtccagtacatgggggagactttgatcccaaatggcttgtactatttatgtcactgtaaaaccaaatcctagggctaaaaaaaaaattcatttgtatcttgcaatatttatgacgatcgtttagccttcatactggagaattgacacttatttggggtagagataaaagtgcttttcaaagtagcaccagttatctctaggggtaatttggggaacttaaaatgacctttcattgggagttatggggtgctcatttcatttcgtatcatgtcctctgcattgtggctttctccaggcatgggtcgataccgcgaggggttcagatattctgaactgacctctctcttctgcagaggggtcatcgcatactcacacactgcatggctccccctgcctccatcacatttctccactgagcagggcttcccttgcccacagaggtgggtgagggtagcagcattggggttacggctgtggtttctttcacttattattagaataatagtcactggtgagacctgaggtagagatggagccgcctctgaaccaagcccacttggtttctttactgcactggttttcatgagaaagcaatttaatattaattctttaggatgttccagcttccctcagtgcattcccttgcagccagttttgctatctgcttagcgacctgcccattgtcattgaagtgtggcttctgggggagcgtcatatcttccattccatctcctgctttaggaaagacagtttttagtccaggggtttctcacctaatgactggatttcaaagccaagatgctgcagttgaatgtgtcaggaagtctctatacaaagagtgaaaagagactttagcatgtgaaccaaatccaaataaattcttcctgaaccatacactagagggggaagaagaaccaacccataatcagacacaccgatctgccttgcagtagaagcactttgaaggtaatttcacagtccaccagactagttttgcatagaacaaaccacagtaagtcggcaagcagagctttctatcttgttggaccactagaaactgtccagctctcttaagcctgcttctgcagcagcatccgtagaatttttgtactacacccaataccagactgggaaggcctatctttcagtgaccctgctaactgctaggatgaatgtatagtaacatgtacaggctacattgtaaacagcacaaaacagaagctgacatgtgtggttattctttttaagagaattataaatactgtaatatataattttattttattggcatgcctttttgtaaatacaaattattaacttattaaataggaaatggcttctggcttatgccattgtcatgtttatttttattttttatacttttctttcttcttagaacttagatgctgtcagccaatgtacatccccaaaccagacagacagacaaaaaattttttattgctaatggtcttttccaaaacaacaaaaaatatatatttttgttccaatgtgcaataaattctaaccacgtctatgcaagatttggctaaacttaataattgttcttaggtcttgagatgggcaacagagctgtaagatcccgccaagtacaccatgtgctcatgctagtgatgtcattaagctactagggcatagtgatgagatttttctgagatctaaccgtttccctccgctagctcctgaccccagcccagcaggctgtctcctcagtaacacatgggccttggtatctggcacccatcagccagcctcataggaaagaagccacctccgctgtatttgaagtttcactttttaaaaaaaaaatgtttcccacctttttatccttcacccactgtccttccacctgctcactcactcactctctcacccatcctgctccacacttctttggtagtaaatgacaccatcaccagcagtttacacccgcagttaacaggcatcgaactgaaagaatcagtgatgacgtttttgtgcatcttcgctgagtgggtaagtggcaatgctttgccaaatattaacgaagccaatcaaagagcagcgcagccacagtatcactgcacatatatatatagatatataaatataatataaatatttattttttgtagccaggtccttggtgcagtatttatactccacaatccaccttttaaaaaaaggacaaaaagcaaaaagatgtgtgatgctgttaataatttaaaatgcagagccaaagccactgagcagcagctgacatggttgctggtttgtgtgtgaaaaacattttccccctcttctttccttaacctccttgttgcttaggatgaggagactctgtaatttaaagcagaggacgagaggaggaagaaacttccatgttaacatggcctactctcactcctttctaaacgagccacttttggcgtcagaagttgactggagagagataaacaaactcccagtcaaagcccctaaagcgacagtgcccagagttcttttattttttgctgcaaccaacgtaaacctgtaaaagaccaacagtgaagattagtgtattagtgaatgcatggaggccaatgctgccctaatgagacgtgataaaaagtccatcactcctctaagccaaaaggaaacaaaataaaaatgaccctttttactgtacaagggaagcctgtcttggtgtgtttgttgcttgactatcccaattcttgagtcctgggaggggtctgggaattgggaccttagcacatttggggaaaggaggggaatagagggaagagaaatcaaaggggctctcgcaaagttctggctaagaaggagagattggaagaaaagcaaggtcctgaccccccccagatccccactcacccattgcatgtggcattccccactactggccggtgcttagaggcccataaaacctctcttcacctaatccacctggcagagccctcagagatgacgtcagccaacccagctggactggccttacttctgcctttttcacctgtatgttaaaaaacaaaaacaaaaaaaccctatccctgtgccccaaagctagggcatgtgcgatgcccaacagcctccactctgcaagctcatactgggccctgccctccatcgccccagacaggcccacagacgagggctggtctccttcacatttgtgtgggggtgggggcacgcttcctcttccttctctccctgtccccctttggggacatccctctctaggcctaggccatgtctcctggttcaggaacactctctcaggaggatctcgaagtgcccactctagtccgctccagtagctccactctggagcgagatggctggtaggtcagtccccatcctcctcccctcggcccccagcctccaggcctgctgtggaggtgagatcgccatgggtcatgactttgtgacttgagtcctgggcatcttctgtaatgatgcctctttcttttctcagatgttgcccacagtttagcaaaaagcttcgttcattttcaggtactccccaccccctaaagaattggctgcaacttgccagccagggggacatcaggagagaagaggaagtctgggttgggaggggcccaagttttgcaacagagtttccattgttcagctctgtgctttcttggattccctttccaagattaccaagatttcctccattaaaactcctgaggcaccccctgcccctgccccccactgctgtttgctgtacatagaggctaagtggggtggggtgggtgggtgtgcacatgtggtgtgtgtgtgtgtgtgtgaagaatgtatataggtaaaggggagtgtggtccagtggttccagaaaagggacagaactgtgttctgtccctagcttgaccgctggctcgctgtgtggccttgggcaagtcacttaacctctctgtgcctcagtttccccatctgtaaaatggggataataatactgacctacctcacaggggtgttgtgaggctttaactaaatgttttgtaaagcgttttgagatacagaggcaaaggcgctagggaagggcaaagtattattggacttaaggaagctgaaatggtaccataaatgctgctattctgagagccattttaaactgcactgctccaaccacccccgcttctcatcaccaggacagcaggtcgagaaaatgtctttcctttcacttgcttctggggtttgtgattattcaagacaattttttccccttgctgtatctccttccctcacctcctcgacttgttccctgttctgtttatgcggaaatggcagaaatgcttgagaaatgagaatgtgtaagtggattggaagtttatagtatgaaatttcaattttactttgtactgtacatctttttactttagaatttgcaataaagggttacgtcaatcttgttttcaactctc

SEQ ID NO: 571 - DNA, 11436 bp, Homo sapiens
  source 1..11436: mol_type = genomic DNA
ggggagcgctccaagatggcgcccaccgcagtcccgcccgccgcatcctcggcgcctttgcagtccggccgcgcctcccgggccccgcgttagggccgccgctgcctccctcgccgccgccgctgccagctgacctgtcctggacgcagcataactaacgaagctgctgcaggatgagaagatggcagcgcggctgcttgcaccaccaggccctgatagtttcaagcctttcacccctgagtcactggcaaacattgagaggcgcattgctgagagcaagctcaagaaaccaccaaaggccgatggcagtcatcgggaggacgatgaggacagcaagcccaagccaaacagcgacctggaagcagggaagagtttgcctttcatctacggggacatcccccaaggcctggttgcagttcccctggaggactttgacccatactatttgacgcagaaaacctttgtagtattaaacagagggaaaactctcttcagatttagtgccacgcctgccttgtacattttaagtccttttaacctgataagaagaatagctattaaaattttgatacattcagtatttagcatgatcattatgtgcactattttgaccaactgtgtattcatgacttttagtaaccctcctgactggtcgaagaatgtggagtacacgttcacagggatttatacatttgaatcactagtgaaaatcattgcaagaggtttctgcatagatggctttacctttttacgggacccatggaactggttagatttcagtgtcatcatgatggcgtatataacagagtttgtaaacctaggcaatgtttcagctctacgcactttcagggtactgagggctttgaaaactatttcggtaatcccaggcctgaagacaattgtgggtgccctgattcagtctgtgaagaaactgtcagatgtgatgatcctgacagtgttctgcctgagtgtttttgccttgatcggactgcagctgttcatggggaaccttcgaaacaagtgtgttgtgtggcccataaacttcaacgagagctatcttgaaaatggcaccaaaggctttgattgggaagagtatatcaacaataaaacaaatttctacacagttcctggcatgctggaacctttactctgtgggaacagttctgatgctgggcaatgcccagagggataccagtgtatgaaagcaggaaggaaccccaactatggttacacaagttttgacacttttagctgggccttcttggcattatttcgccttatgacccaggactattgggaaaacttgtatcaattgactttacgagcagccgggaaaacatacatgatcttcttcgtcttggtcatctttgtgggttctttctatctggtgaacttgatcttggctgtggtggccatggcttatgaagaacagaatcaggcaacactggaggaggcagaacaaaaagaggctgaatttaaagcaatgttggagcaacttaagaagcaacaggaagaggcacaggctgctgcgatggccacttcagcaggaactgtctcagaagatgccatagaggaagaaggtgaagaaggagggggctcccctcggagctcttctgaaatctctaaactcagctcaaagagtgcaaaggaaagacgtaacaggagaaagaagaggaagcaaaaggaactctctgaaggagaggagaaaggggatcccgagaaggtgtttaagtcagagtcagaagatggcatgagaaggaaggcctttcggctgccagacaacagaatagggaggaaattttccatcatgaatcagtcactgctcagcatcccaggctcgcccttcctctcccgccacaacagcaagagcagcatcttcagtttcaggggacctgggcggttccgagacccgggctccgagaatgagttcgcggatgacgagcacagcacggtggaggagagcgagggccgccgggactccctcttcatccccatccgggcccgcgagcgccggagcagctacagcggctacagcggctacagccagggcagccgctcctcgcgcatcttccccagcctgcggcgcagcgtgaagcgcaacagcacggtggactgcaacggcgtggtgtccctcatcggcggccccggctcccacatcggcgggcgtctcctgccagaggctacaactgaggtggaaattaagaagaaaggccctggatctcttttagtttccatggaccaattagcctcctacgggcggaaggacagaatcaacagtataatgagtgttgttacaaatacactagtagaagaactggaagagtctcagagaaagtgcccgccatgctggtataaatttgccaacactttcctcatctgggagtgccacccctactggataaaactgaaagagattgtgaacttgatagttatggacccttttgtggatttagccatcaccatctgcatcgtcctgaatacactgtttatggcaatggagcaccatcctatgacaccacaatttgaacatgtcttggctgtaggaaatctggttttcactggaattttcacagcggaaatgttcctgaagctcatagccatggatccctactattatttccaagaaggttggaacatttttgacggatttattgtctccctcagtttaatggaactgagtctagcagacgtggaggggctttcagtgctgcgatctttccgattgctccgagtcttcaaattggccaaatcctggcccaccctgaacatgctaatcaagattattggaaattcagtgggtgccctgggcaacctgacactggtgctggccattattgtcttcatctttgccgtggtggggatgcaactctttggaaaaagctacaaagagtgtgtctgcaagatcaaccaggactgtgaactccctcgctggcatatgcatgactttttccattccttcctcattgtctttcgagtgttgtgcggggagtggattgagaccatgtgggactgcatggaagtggcaggccaggccatgtgcctcattgtctttatgatggtcatggtgattggcaacttggtggtgctgaacctgtttctggccttgctcctgagctccttcagtgcagacaacctggctgccacagatgacgatggggaaatgaacaacctccagatctcagtgatccgtatcaagaagggtgtggcctggaccaaactaaaggtgcacgccttcatgcaggcccactttaagcagcgtgaggctgatgaggtgaagcctctggatgagttgtatgaaaagaaggccaactgtatcgccaatcacaccggtgcagacatccaccggaatggtgacttccagaagaatggcaatggcacaaccagcggcattggcagcagcgtggagaagtacatcattgatgaggaccacatgtccttcatcaacaaccccaacttgactgtacgggtacccattgctgtgggcgagtctgactttgagaacctcaacacagaggatgttagcagcgagtcggatcctgaaggcagcaaagataaactagatgacaccagctcctctgaaggaagcaccattgatatcaaaccagaagtagaagaggtccctgtggaacagcctgaggaatacttggatccagatgcctgcttcacagaaggttgtgtccagcggttcaagtgctgccaggtcaacatcgaggaagggctaggcaagtcttggtggatcctgcggaaaacctgcttcctcatcgtggagcacaactggtttgagaccttcatcatcttcatgattctgctgagcagtggcgccctggccttcgaggacatctacattgagcagagaaagaccatccgcaccatcctggaatatgctgacaaagtcttcacctatatcttcatcctggagatgttgctcaagtggacagcctatggcttcgtcaagttcttcaccaatgcctggtgttggctggacttcctcattgtggctgtggtggtgaatgccttggtgggcgccatcccctccatcatgaatgtgctgctggtgtgtctcatcttctggctgattttcagcatcatgggagttaacttgtttgcgggaaagtaccactactgctttaatgagacttctgaaatccgatttgaaattgaagatgtcaacaataaaactgaatgtgaaaagcttatggaggggaacaatacagagatcagatggaagaacgtgaagatcaactttgacaatgttggggcaggatacctggcccttcttcaagtagcaaccttcaaaggctggatggacatcatgtatgcagctgtagattcccggaagcctgatgagcagcctaagtatgaggacaatatctacatgtacatctattttgtcatcttcatcatcttcggctccttcttcaccctgaacctgttcattggtgtcatcattgataacttcaatcaacaaaagaaaaagttcggaggtcaggacatcttcatgaccgaagaacagaagaagtactacaatgccatgaaaaagctgggctcaaagaagccacagaaacctattccccgccccttgaacaaaatccaaggaatcgtctttgattttgtcactcagcaagcctttgacattgttatcatgatgctcatctgccttaacatggtgacaatgatggtggagacagacactcaaagcaagcagatggagaacatcctctactggattaacctggtgtttgttatcttcttcacctgtgagtgtgtgctcaaaatgtttgcgttgaggcactactacttcaccattggctggaacatcttcgacttcgtggtagtcatcctctccattgtgggaatgttcctggcagatataattgagaaatactttgtttccccaaccctattccgagtcatccgattggcccgtattgggcgcatcttgcgtctgatcaaaggcgccaaagggattcgtaccctgctctttgccttaatgatgtccttgcctgccctgttcaacatcggccttctgctcttcctggtcatgttcatcttctccatttttgggatgtccaattttgcatatgtgaagcacgaggctggtatcgatgacatgttcaactttgagacatttggcaacagcatgatctgcctgtttcaaatcacaacctcagctggttgggatggcctgctgctgcccatcctaaaccgcccccctgactgcagcctagataaggaacacccagggagtggctttaagggagattgtgggaacccctcagtgggcatcttcttctttgtaagctacatcatcatctctttcctaattgtcgtgaacatgtacattgccatcatcctggagaacttcagtgtagccacagaggaaagtgcagaccctctgagtgaggatgactttgagaccttctatgagatctgggagaagttcgaccccgatgccacccagttcattgagtactgtaagctggcagactttgcagatgccttggagcatcctctccgagtgcccaagcccaataccattgagctcatcgctatggatctgccaatggtgagcggggatcgcatccactgcttggacatcctttttgccttcaccaagcgggtcctgggagatagcggggagttggacatcctgcggcagcagatggaagagcggttcgtggcatccaatccttccaaagtgtcttacgagccaatcacaaccacactgcgtcgcaagcaggaggaggtatctgcagtggtcctgcagcgtgcctaccggggacatttggcaaggcggggcttcatctgcaaaaagacaacttctaataagctggagaatggaggcacacaccgggagaaaaaagagagcaccccatctacagcctccctcccgtcctatgacagtgtaactaaacctgaaaaggagaaacagcagcgggcagaggaaggaagaagggaaagagccaaaagacaaaaagaggtcagagaatccaagtgttagaggagaacaaaaattcagtattatacagatctaaaactcgcaagtgaaagattgtttacaaacttcctgaatattatcaatgcagaacagctgtggagactctaacctgaagatctataccaaacgtcgtctgcttaccacgtaacacagctgcatcttgagcagtgacctgccaagggcaaaggaccccgctccctagacttacagattttctaatgcttgggcaggtggttactgcatgttccacatcagtcaatgcaacttaggacaaaactaaccagatacagaaacagaagagaggctgccgggaccagcatatttccgttgcagccaaatggattttattttttcattttattgattctcagaagcagaaagcatcactttaaaagttcgtttgttcatgcaaactatatttgcattcttacattagttaagctaagcagcaaaaagaaaacacacacacacactcacatttagcccatgtcatttaattgtcagtttctttgacataaagcgcatcttctccacatgggcttcacgtggtttggagatgggtgggggaaaacaatcaggtttcttcaggctgaggaggacttgctcaggccgattccaaacattgtgctcgttcaatgcgtagaaatgatttgcatgatggcatgccgtgatcagaagtcatgcatgagatccatacaccacaggacactactaatctagtcccttgcactgggtcagcctttggacaggacccagccctgcaccgttcactgtatttggagaaaatggtaagagttccataccggctacaattctttgagttcttaaaagtccttcatacaccttctgggtagggaaacaaccaactaattgactaacaccaccaacaacaaaaaacaaacccaatccaacaagcagatggatccgttgcgtgtatatgtttaacagacatctctaacatacagccattgttgcacattttgcaagatgaactatttaatgctgctctgtgtccagtacatgggggagactttgatcccaaatggcttgtactatttatgtcactgtaaaaccaaatcctagggctaaaaaaaaaattcatttgtatcttgcaatatttatgacgatcgtttagccttcatactggagaattgacacttatttggggtagagataaaagtgcttttcaaagtagcaccagttatctctaggggtaatttggggaacttaaaatgacctttcattgggagttatggggtgctcatttcatttcgtatcatgtcctctgcattgtggctttctccaggcatgggtcgataccgcgaggggttcagatattctgaactgacctctctcttctgcagaggggtcatcgcatactcacacactgcatggctccccctgcctccatcacatttctccactgagcagggcttcccttgcccacagaggtgggtgagggtagcagcattggggttacggctgtggtttctttcacttattattagaataatagtcactggtgagacctgaggtagagatggagccgcctctgaaccaagcccacttggtttctttactgcactggttttcatgagaaagcaatttaatattaattctttaggatgttccagcttccctcagtgcattcccttgcagccagttttgctatctgcttagcgacctgcccattgtcattgaagtgtggcttctgggggagcgtcatatcttccattccatctcctgctttaggaaagacagtttttagtccaggggtttctcacctaatgactggatttcaaagccaagatgctgcagttgaatgtgtcaggaagtctctatacaaagagtgaaaagagactttagcatgtgaaccaaatccaaataaattcttcctgaaccatacactagagggggaagaagaaccaacccataatcagacacaccgatctgccttgcagtagaagcactttgaaggtaatttcacagtccaccagactagttttgcatagaacaaaccacagtaagtcggcaagcagagctttctatcttgttggaccactagaaactgtccagctctcttaagcctgcttctgcagcagcatccgtagaatttttgtactacacccaataccagactgggaaggcctatctttcagtgaccctgctaactgctaggatgaatgtatagtaacatgtacaggctacattgtaaacagcacaaaacagaagctgacatgtgtggttattctttttaagagaattataaatactgtaatatataattttattttattggcatgcctttttgtaaatacaaattattaacttattaaataggaaatggcttctggcttatgccattgtcatgtttatttttattttttatacttttctttcttcttagaacttagatgctgtcagccaatgtacatccccaaaccagacagacagacaaaaaattttttattgctaatggtcttttccaaaacaacaaaaaatatatatttttgttccaatgtgcaataaattctaaccacgtctatgcaagatttggctaaacttaataattgttcttaggtcttgagatgggcaacagagctgtaagatcccgccaagtacaccatgtgctcatgctagtgatgtcattaagctactagggcatagtgatgagatttttctgagatctaaccgtttccctccgctagctcctgaccccagcccagcaggctgtctcctcagtaacacatgggccttggtatctggcacccatcagccagcctcataggaaagaagccacctccgctgtatttgaagtttcactttttaaaaaaaaaatgtttcccacctttttatccttcacccactgtccttccacctgctcactcactcactctctcacccatcctgctccacacttctttggtagtaaatgacaccatcaccagcagtttacacccgcagttaacaggcatcgaactgaaagaatcagtgatgacgtttttgtgcatcttcgctgagtgggtaagtggcaatgctttgccaaatattaacgaagccaatcaaagagcagcgcagccacagtatcactgcacatatatatatagatatataaatataatataaatatttattttttgtagccaggtccttggtgcagtatttatactccacaatccaccttttaaaaaaaggacaaaaagcaaaaagatgtgtgatgctgttaataatttaaaatgcagagccaaagccactgagcagcagctgacatggttgctggtttgtgtgtgaaaaacattttccccctcttctttccttaacctccttgttgcttaggatgaggagactctgtaatttaaagcagaggacgagaggaggaagaaacttccatgttaacatggcctactctcactcctttctaaacgagccacttttggcgtcagaagttgactggagagagataaacaaactcccagtcaaagcccctaaagcgacagtgcccagagttcttttattttttgctgcaaccaacgtaaacctgtaaaagaccaacagtgaagattagtgtattagtgaatgcatggaggccaatgctgccctaatgagacgtgataaaaagtccatcactcctctaagccaaaaggaaacaaaataaaaatgaccctttttactgtacaagggaagcctgtcttggtgtgtttgttgcttgactatcccaattcttgagtcctgggaggggtctgggaattgggaccttagcacatttggggaaaggaggggaatagagggaagagaaatcaaaggggctctcgcaaagttctggctaagaaggagagattggaagaaaagcaaggtcctgaccccccccagatccccactcacccattgcatgtggcattccccactactggccggtgcttagaggcccataaaacctctcttcacctaatccacctggcagagccctcagagatgacgtcagccaacccagctggactggccttacttctgcctttttcacctgtatgttaaaaaacaaaaacaaaaaaaccctatccctgtgccccaaagctagggcatgtgcgatgcccaacagcctccactctgcaagctcatactgggccctgccctccatcgccccagacaggcccacagacgagggctggtctccttcacatttgtgtgggggtgggggcacgcttcctcttccttctctccctgtccccctttggggacatccctctctaggcctaggccatgtctcctggttcaggaacactctctcaggaggatctcgaagtgcccactctagtccgctccagtagctccactctggagcgagatggctggtaggtcagtccccatcctcctcccctcggcccccagcctccaggcctgctgtggaggtgagatcgccatgggtcatgactttgtgacttgagtcctgggcatcttctgtaatgatgcctctttcttttctcagatgttgcccacagtttagcaaaaagcttcgttcattttcaggtactccccaccccctaaagaattggctgcaacttgccagccagggggacatcaggagagaagaggaagtctgggttgggaggggcccaagttttgcaacagagtttccattgttcagctctgtgctttcttggattccctttccaagattaccaagatttcctccattaaaactcctgaggcaccccctgcccctgccccccactgctgtttgctgtacatagaggctaagtggggtggggtgggtgggtgtgcacatgtggtgtgtgtgtgtgtgtgtgaagaatgtatataggtaaaggggagtgtggtccagtggttccagaaaagggacagaactgtgttctgtccctagcttgaccgctggctcgctgtgtggccttgggcaagtcacttaacctctctgtgcctcagtttccccatctgtaaaatggggataataatactgacctacctcacaggggtgttgtgaggctttaactaaatgttttgtaaagcgttttgagatacagaggcaaaggcgctagggaagggcaaagtattattggacttaaggaagctgaaatggtaccataaatgctgctattctgagagccattttaaactgcactgctccaaccacccccgcttctcatcaccaggacagcaggtcgagaaaatgtctttcctttcacttgcttctggggtttgtgattattcaagacaattttttccccttgctgtatctccttccctcacctcctcgacttgttccctgttctgtttatgcggaaatggcagaaatgcttgagaaatgagaatgtgtaagtggattggaagtttatagtatgaaatttcaattttactttgtactgtacatctttttactttagaatttgcaataaagggttacgtcaatcttgttttcaactctc

SEQ ID NO: 572 - DNA, 11436 bp, Homo sapiens
  source 1..11436: mol_type = genomic DNA
ggggagcgctccaagatggcgcccaccgcagtcccgcccgccgcatcctcggcgcctttgcagtccggccgcgcctcccgggccccgcgttagggccgccgctgcctccctcgccgccgccgctgccagctgacctgtcctggacgcagcataactaacgaagctgctgcaggatgagaagatggcagcgcggctgcttgcaccaccaggccctgatagtttcaagcctttcacccctgagtcactggcaaacattgagaggcgcattgctgagagcaagctcaagaaaccaccaaaggccgatggcagtcatcgggaggacgatgaggacagcaagcccaagccaaacagcgacctggaagcagggaagagtttgcctttcatctacggggacatcccccaaggcctggttgcagttcccctggaggactttgacccatactatttgacgcagaaaacctttgtagtattaaacagagggaaaactctcttcagatttagtgccacgcctgccttgtacattttaagtccttttaacctgataagaagaatagctattaaaattttgatacattcagtatttagcatgatcattatgtgcactattttgaccaactgtgtattcatgacttttagtaaccctcctgactggtcgaagaatgtggagtacacgttcacagggatttatacatttgaatcactagtgaaaatcattgcaagaggtttctgcatagatggctttacctttttacgggacccatggaactggttagatttcagtgtcatcatgatggcatatgtgacagagtttgtggacctgggcaatgtctcagcgctgagaacattcagggttctccgagctttgaaaactatctctgtaattccaggcctgaagacaattgtgggtgccctgattcagtctgtgaagaaactgtcagatgtgatgatcctgacagtgttctgcctgagtgtttttgccttgatcggactgcagctgttcatggggaaccttcgaaacaagtgtgttgtgtggcccataaacttcaacgagagctatcttgaaaatggcaccaaaggctttgattgggaagagtatatcaacaataaaacaaatttctacacagttcctggcatgctggaacctttactctgtgggaacagttctgatgctgggcaatgcccagagggataccagtgtatgaaagcaggaaggaaccccaactatggttacacaagttttgacacttttagctgggccttcttggcattatttcgccttatgacccaggactattgggaaaacttgtatcaattgactttacgagcagccgggaaaacatacatgatcttcttcgtcttggtcatctttgtgggttctttctatctggtgaacttgatcttggctgtggtggccatggcttatgaagaacagaatcaggcaacactggaggaggcagaacaaaaagaggctgaatttaaagcaatgttggagcaacttaagaagcaacaggaagaggcacaggctgctgcgatggccacttcagcaggaactgtctcagaagatgccatagaggaagaaggtgaagaaggagggggctcccctcggagctcttctgaaatctctaaactcagctcaaagagtgcaaaggaaagacgtaacaggagaaagaagaggaagcaaaaggaactctctgaaggagaggagaaaggggatcccgagaaggtgtttaagtcagagtcagaagatggcatgagaaggaaggcctttcggctgccagacaacagaatagggaggaaattttccatcatgaatcagtcactgctcagcatcccaggctcgcccttcctctcccgccacaacagcaagagcagcatcttcagtttcaggggacctgggcggttccgagacccgggctccgagaatgagttcgcggatgacgagcacagcacggtggaggagagcgagggccgccgggactccctcttcatccccatccgggcccgcgagcgccggagcagctacagcggctacagcggctacagccagggcagccgctcctcgcgcatcttccccagcctgcggcgcagcgtgaagcgcaacagcacggtggactgcaacggcgtggtgtccctcatcggcggccccggctcccacatcggcgggcgtctcctgccagaggctacaactgaggtggaaattaagaagaaaggccctggatctcttttagtttccatggaccaattagcctcctacgggcggaaggacagaatcaacagtataatgagtgttgttacaaatacactagtagaagaactggaagagtctcagagaaagtgcccgccatgctggtataaatttgccaacactttcctcatctgggagtgccacccctactggataaaactgaaagagattgtgaacttgatagttatggacccttttgtggatttagccatcaccatctgcatcgtcctgaatacactgtttatggcaatggagcaccatcctatgacaccacaatttgaacatgtcttggctgtaggaaatctggttttcactggaattttcacagcggaaatgttcctgaagctcatagccatggatccctactattatttccaagaaggttggaacatttttgacggatttattgtctccctcagtttaatggaactgagtctagcagacgtggaggggctttcagtgctgcgatctttccgattgctccgagtcttcaaattggccaaatcctggcccaccctgaacatgctaatcaagattattggaaattcagtgggtgccctgggcaacctgacactggtgctggccattattgtcttcatctttgccgtggtggggatgcaactctttggaaaaagctacaaagagtgtgtctgcaagatcaaccaggactgtgaactccctcgctggcatatgcatgactttttccattccttcctcattgtctttcgagtgttgtgcggggagtggattgagaccatgtgggactgcatggaagtggcaggccaggccatgtgcctcattgtctttatgatggtcatggtgattggcaacttggtggtgctgaacctgtttctggccttgctcctgagctccttcagtgcagacaacctggctgccacagatgacgatggggaaatgaacaacctccagatctcagtgatccgtatcaagaagggtgtggcctggaccaaactaaaggtgcacgccttcatgcaggcccactttaagcagcgtgaggctgatgaggtgaagcctctggatgagttgtatgaaaagaaggccaactgtatcgccaatcacaccggtgcagacatccaccggaatggtgacttccagaagaatggcaatggcacaaccagcggcattggcagcagcgtggagaagtacatcattgatgaggaccacatgtccttcatcaacaaccccaacttgactgtacgggtacccattgctgtgggcgagtctgactttgagaacctcaacacagaggatgttagcagcgagtcggatcctgaaggcagcaaagataaactagatgacaccagctcctctgaaggaagcaccattgatatcaaaccagaagtagaagaggtccctgtggaacagcctgaggaatacttggatccagatgcctgcttcacagaaggttgtgtccagcggttcaagtgctgccaggtcaacatcgaggaagggctaggcaagtcttggtggatcctgcggaaaacctgcttcctcatcgtggagcacaactggtttgagaccttcatcatcttcatgattctgctgagcagtggcgccctggccttcgaggacatctacattgagcagagaaagaccatccgcaccatcctggaatatgctgacaaagtcttcacctatatcttcatcctggagatgttgctcaagtggacagcctatggcttcgtcaagttcttcaccaatgcctggtgttggctggacttcctcattgtggctgtggtggtgaatgccttggtgggcgccatcccctccatcatgaatgtgctgctggtgtgtctcatcttctggctgattttcagcatcatgggagttaacttgtttgcgggaaagtaccactactgctttaatgagacttctgaaatccgatttgaaattgaagatgtcaacaataaaactgaatgtgaaaagcttatggaggggaacaatacagagatcagatggaagaacgtgaagatcaactttgacaatgttggggcaggatacctggcccttcttcaagtagcaaccttcaaaggctggatggacatcatgtatgcagctgtagattcccggaagcctgatgagcagcctaagtatgaggacaatatctacatgtacatctattttgtcatcttcatcatcttcggctccttcttcaccctgaacctgttcattggtgtcatcattgataacttcaatcaacaaaagaaaaagttcggaggtcaggacatcttcatgaccgaagaacagaagaagtactacaatgccatgaaaaagctgggctcaaagaagccacagaaacctattccccgccccttgaacaaaatccaaggaatcgtctttgattttgtcactcagcaagcctttgacattgttatcatgatgctcatctgccttaacatggtgacaatgatggtggagacagacactcaaagcaagcagatggagaacatcctctactggattaacctggtgtttgttatcttcttcacctgtgagtgtgtgctcaaaatgtttgcgttgaggcactactacttcaccattggctggaacatcttcgacttcgtggtagtcatcctctccattgtgggaatgttcctggcagatataattgagaaatactttgtttccccaaccctattccgagtcatccgattggcccgtattgggcgcatcttgcgtctgatcaaaggcgccaaagggattcgtaccctgctctttgccttaatgatgtccttgcctgccctgttcaacatcggccttctgctcttcctggtcatgttcatcttctccatttttgggatgtccaattttgcatatgtgaagcacgaggctggtatcgatgacatgttcaactttgagacatttggcaacagcatgatctgcctgtttcaaatcacaacctcagctggttgggatggcctgctgctgcccatcctaaaccgcccccctgactgcagcctagataaggaacacccagggagtggctttaagggagattgtgggaacccctcagtgggcatcttcttctttgtaagctacatcatcatctctttcctaattgtcgtgaacatgtacattgccatcatcctggagaacttcagtgtagccacagaggaaagtgcagaccctctgagtgaggatgactttgagaccttctatgagatctgggagaagttcgaccccgatgccacccagttcattgagtactgtaagctggcagactttgcagatgccttggagcatcctctccgagtgcccaagcccaataccattgagctcatcgctatggatctgccaatggtgagcggggatcgcatccactgcttggacatcctttttgccttcaccaagcgggtcctgggagatagcggggagttggacatcctgcggcagcagatggaagagcggttcgtggcatccaatccttccaaagtgtcttacgagccaatcacaaccacactgcgtcgcaagcaggaggaggtatctgcagtggtcctgcagcgtgcctaccggggacatttggcaaggcggggcttcatctgcaaaaagacaacttctaataagctggagaatggaggcacacaccgggagaaaaaagagagcaccccatctacagcctccctcccgtcctatgacagtgtaactaaacctgaaaaggagaaacagcagcgggcagaggaaggaagaagggaaagagccaaaagacaaaaagaggtcagagaatccaagtgttagaggagaacaaaaattcagtattatacagatctaaaactcgcaagtgaaagattgtttacaaacttcctgaatattatcaatgcagaacagctgtggagactctaacctgaagatctataccaaacgtcgtctgcttaccacgtaacacagctgcatcttgagcagtgacctgccaagggcaaaggaccccgctccctagacttacagattttctaatgcttgggcaggtggttactgcatgttccacatcagtcaatgcaacttaggacaaaactaaccagatacagaaacagaagagaggctgccgggaccagcatatttccgttgcagccaaatggattttattttttcattttattgattctcagaagcagaaagcatcactttaaaagttcgtttgttcatgcaaactatatttgcattcttacattagttaagctaagcagcaaaaagaaaacacacacacacactcacatttagcccatgtcatttaattgtcagtttctttgacataaagcgcatcttctccacatgggcttcacgtggtttggagatgggtgggggaaaacaatcaggtttcttcaggctgaggaggacttgctcaggccgattccaaacattgtgctcgttcaatgcgtagaaatgatttgcatgatggcatgccgtgatcagaagtcatgcatgagatccatacaccacaggacactactaatctagtcccttgcactgggtcagcctttggacaggacccagccctgcaccgttcactgtatttggagaaaatggtaagagttccataccggctacaattctttgagttcttaaaagtccttcatacaccttctgggtagggaaacaaccaactaattgactaacaccaccaacaacaaaaaacaaacccaatccaacaagcagatggatccgttgcgtgtatatgtttaacagacatctctaacatacagccattgttgcacattttgcaagatgaactatttaatgctgctctgtgtccagtacatgggggagactttgatcccaaatggcttgtactatttatgtcactgtaaaaccaaatcctagggctaaaaaaaaaattcatttgtatcttgcaatatttatgacgatcgtttagccttcatactggagaattgacacttatttggggtagagataaaagtgcttttcaaagtagcaccagttatctctaggggtaatttggggaacttaaaatgacctttcattgggagttatggggtgctcatttcatttcgtatcatgtcctctgcattgtggctttctccaggcatgggtcgataccgcgaggggttcagatattctgaactgacctctctcttctgcagaggggtcatcgcatactcacacactgcatggctccccctgcctccatcacatttctccactgagcagggcttcccttgcccacagaggtgggtgagggtagcagcattggggttacggctgtggtttctttcacttattattagaataatagtcactggtgagacctgaggtagagatggagccgcctctgaaccaagcccacttggtttctttactgcactggttttcatgagaaagcaatttaatattaattctttaggatgttccagcttccctcagtgcattcccttgcagccagttttgctatctgcttagcgacctgcccattgtcattgaagtgtggcttctgggggagcgtcatatcttccattccatctcctgctttaggaaagacagtttttagtccaggggtttctcacctaatgactggatttcaaagccaagatgctgcagttgaatgtgtcaggaagtctctatacaaagagtgaaaagagactttagcatgtgaaccaaatccaaataaattcttcctgaaccatacactagagggggaagaagaaccaacccataatcagacacaccgatctgccttgcagtagaagcactttgaaggtaatttcacagtccaccagactagttttgcatagaacaaaccacagtaagtcggcaagcagagctttctatcttgttggaccactagaaactgtccagctctcttaagcctgcttctgcagcagcatccgtagaatttttgtactacacccaataccagactgggaaggcctatctttcagtgaccctgctaactgctaggatgaatgtatagtaacatgtacaggctacattgtaaacagcacaaaacagaagctgacatgtgtggttattctttttaagagaattataaatactgtaatatataattttattttattggcatgcctttttgtaaatacaaattattaacttattaaataggaaatggcttctggcttatgccattgtcatgtttatttttattttttatacttttctttcttcttagaacttagatgctgtcagccaatgtacatccccaaaccagacagacagacaaaaaattttttattgctaatggtcttttccaaaacaacaaaaaatatatatttttgttccaatgtgcaataaattctaaccacgtctatgcaagatttggctaaacttaataattgttcttaggtcttgagatgggcaacagagctgtaagatcccgccaagtacaccatgtgctcatgctagtgatgtcattaagctactagggcatagtgatgagatttttctgagatctaaccgtttccctccgctagctcctgaccccagcccagcaggctgtctcctcagtaacacatgggccttggtatctggcacccatcagccagcctcataggaaagaagccacctccgctgtatttgaagtttcactttttaaaaaaaaaatgtttcccacctttttatccttcacccactgtccttccacctgctcactcactcactctctcacccatcctgctccacacttctttggtagtaaatgacaccatcaccagcagtttacacccgcagttaacaggcatcgaactgaaagaatcagtgatgacgtttttgtgcatcttcgctgagtgggtaagtggcaatgctttgccaaatattaacgaagccaatcaaagagcagcgcagccacagtatcactgcacatatatatatagatatataaatataatataaatatttattttttgtagccaggtccttggtgcagtatttatactccacaatccaccttttaaaaaaaggacaaaaagcaaaaagatgtgtgatgctgttaataatttaaaatgcagagccaaagccactgagcagcagctgacatggttgctggtttgtgtgtgaaaaacattttccccctcttctttccttaacctccttgttgcttaggatgaggagactctgtaatttaaagcagaggacgagaggaggaagaaacttccatgttaacatggcctactctcactcctttctaaacgagccacttttggcgtcagaagttgactggagagagataaacaaactcccagtcaaagcccctaaagcgacagtgcccagagttcttttattttttgctgcaaccaacgtaaacctgtaaaagaccaacagtgaagattagtgtattagtgaatgcatggaggccaatgctgccctaatgagacgtgataaaaagtccatcactcctctaagccaaaaggaaacaaaataaaaatgaccctttttactgtacaagggaagcctgtcttggtgtgtttgttgcttgactatcccaattcttgagtcctgggaggggtctgggaattgggaccttagcacatttggggaaaggaggggaatagagggaagagaaatcaaaggggctctcgcaaagttctggctaagaaggagagattggaagaaaagcaaggtcctgaccccccccagatccccactcacccattgcatgtggcattccccactactggccggtgcttagaggcccataaaacctctcttcacctaatccacctggcagagccctcagagatgacgtcagccaacccagctggactggccttacttctgcctttttcacctgtatgttaaaaaacaaaaacaaaaaaaccctatccctgtgccccaaagctagggcatgtgcgatgcccaacagcctccactctgcaagctcatactgggccctgccctccatcgccccagacaggcccacagacgagggctggtctccttcacatttgtgtgggggtgggggcacgcttcctcttccttctctccctgtccccctttggggacatccctctctaggcctaggccatgtctcctggttcaggaacactctctcaggaggatctcgaagtgcccactctagtccgctccagtagctccactctggagcgagatggctggtaggtcagtccccatcctcctcccctcggcccccagcctccaggcctgctgtggaggtgagatcgccatgggtcatgactttgtgacttgagtcctgggcatcttctgtaatgatgcctctttcttttctcagatgttgcccacagtttagcaaaaagcttcgttcattttcaggtactccccaccccctaaagaattggctgcaacttgccagccagggggacatcaggagagaagaggaagtctgggttgggaggggcccaagttttgcaacagagtttccattgttcagctctgtgctttcttggattccctttccaagattaccaagatttcctccattaaaactcctgaggcaccccctgcccctgccccccactgctgtttgctgtacatagaggctaagtggggtggggtgggtgggtgtgcacatgtggtgtgtgtgtgtgtgtgtgaagaatgtatataggtaaaggggagtgtggtccagtggttccagaaaagggacagaactgtgttctgtccctagcttgaccgctggctcgctgtgtggccttgggcaagtcacttaacctctctgtgcctcagtttccccatctgtaaaatggggataataatactgacctacctcacaggggtgttgtgaggctttaactaaatgttttgtaaagcgttttgagatacagaggcaaaggcgctagggaagggcaaagtattattggacttaaggaagctgaaatggtaccataaatgctgctattctgagagccattttaaactgcactgctccaaccacccccgcttctcatcaccaggacagcaggtcgagaaaatgtctttcctttcacttgcttctggggtttgtgattattcaagacaattttttccccttgctgtatctccttccctcacctcctcgacttgttccctgttctgtttatgcggaaatggcagaaatgcttgagaaatgagaatgtgtaagtggattggaagtttatagtatgaaatttcaattttactttgtactgtacatctttttactttagaatttgcaataaagggttacgtcaatcttgttttcaactctc

SEQ ID NO: 573 - DNA, 3439 bp, Homo sapiens
  source 1..3439: mol_type = genomic DNA
cggggctgctacctccacgggcgcgccctggcaggaggggcgcagtctgcttgcaggcggtcgccagcgctccagcggcggctgtcggctttccaattccgccagctcggctgaggctgggctagcctgggtgccagtggctgctagcggcaggcgtcccctgagcaacaggagcccagagaaaaagaagcagccctgagagagcgccggggaaggagaggcccgcgccctctcctggagccagattctgcaggtgcactgggtggggatgatcggcgggctaggttgcaagcctcttatgtgaggagctgaagaggaattaaaatatacaggatgaaaagatggcaatgttgcctcccccaggacctcagagctttgtccatttcacaaaacagtctcttgccctcattgaacaacgcattgctgaaagaaaatcaaaggaacccaaagaagaaaagaaagatgatgatgaagaagccccaaagccaagcagtgacttggaagctggcaaacagctgcccttcatctatggggacattcctcccggcatggtgtcagagcccctggaggacttggacccctactatgcagacaaaaagactttcatagtattgaacaaagggaaaacaatcttccgtttcaatgccacacctgctttatatatgctttctcctttcagtcctctaagaagaatatctattaagattttagtacactccttattcagcatgctcatcatgtgcactattctgacaaactgcatatttatgaccatgaataacccaccggactggaccaaaaatgtcgagtacacttttactggaatatatacttttgaatcacttgtaaaaatccttgcaagaggcttctgtgtaggagaattcacttttcttcgtgacccgtggaactggctggattttgtcgtcattgtttttgcgtatttaacagaatttgtaaacctaggcaatgtttcagctcttcgaactttcagagtattgagagctttgaaaactatttctgtaatcccaggcctgaagacaattgtaggggctttgatccagtcagtgaagaagctttctgatgtcatgatcctgactgtgttctgtctgagtgtgtttgcactaattggactacagctgttcatgggaaacctgaagcataaatgttttcgaaattcacttgaaaataatgaaacattagaaagcataatgaataccctagagagtgaagaagactttagaaaatatttttattacttggaaggatccaaagatgctctcctttgtggtttcagcacagattcaggtcagtgtccagaggggtacacctgtgtgaaaattggcagaaaccctgattatggctacacgagctttgacactttcagctgggccttcttagccttgtttaggctaatgacccaagattactgggaaaacctttaccaacagacgctgcgtgctgctggcaaaacctacatgatcttctttgtcgtagtgattttcctgggctccttttatctaataaacttgatcctggctgtggttgccatggcatatgaagaacagaaccaggcaaacattgaagaagctaaacagaaagaattagaatttcaacagatgttagaccgtcttaaaaaagagcaagaagaagctgaggcaattgcagcggcagcggctgaatatacaagtattaggagaagcagaattatgggcctctcagagagttcttctgaaacatccaaactgagctctaaaagtgctaaagaaagaagaaacagaagaaagaaaaagaatcaaaagaagctctccagtggagaggaaaagggagatgctgagaaattgtcgaaatcagaatcagaggacagcatcagaagaaaaagtttccaccttggtgtcgaagggcataggcgagcacatgaaaagaggttgtctacccccaatcagtcaccactcagcattcgtggctccttgttttctgcaaggcgaagcagcagaacaagtctttttagtttcaaaggcagaggaagagatataggatctgagactgaatttgccgatgatgagcacagcatttttggagacaatgagagcagaaggggctcactgtttgtgccccacagaccccaggagcgacgcagcagtaacatcagccaagccagtaggtccccaccaatgctgccggtgaacgggaaaatgcacagtgctgtggactgcaacggtgtggtctccctggttgatggacgctcagccctcatgctccccaatggacagcttctgccagaggtgataatagataaggcaacttctgatgacagcggcacgaccaatcaaatacacaagaaaaggcgttgtagttcctatctcctttcagaggatatgctgaatgatcccaacctcagacagagagcaatgagtagagcaagcatattaacaaacactgtggaagaacttgaagagtccagacaaaaatgtccaccttggtggtacagatttgcacacaaattcttgatctggaattgctctccatattggataaaattcaaaaagtgtatctattttattgtaatggatccttttgtagatcttgcaattaccatttgcatagttttaaacacattatttatggctatggaacaccacccaatgactgaggaattcaaaaatgtacttgctataggaaatttggtctttactggaatctttgcagctgaaatggtattaaaactgattgccatggatccatatgagtatttccaagtaggctggaatatttttgacagccttattgtgactttaagtttagtggagctctttctagcagatgtggaaggattgtcagttctgcgatcattcagactgctccgagtcttcaagttggcaaaatcctggccaacattgaacatgctgattaagatcattggtaactcagtaggggctctaggtaacctcaccttagtgttggccatcatcgtcttcatttttgctgtggtcggcatgcagctctttggtaagagctacaaagaatgtgtctgcaagatcaatgatgactgtacgctcccacggtggcacatgaacgacttcttccactccttcctgattgtgttccgcgtgctgtgtggagagtggatagagaccatgtgggactgtatggaggtcgctggtcaagctatgtgccttattgtttacatgatggtcatggtcattggaaacctggtgggcaaacataataggcaatgaagccagccaatcataatgccattattgcatgtgaatcaggttcaaggggcaggtccttttctgtgctttaaaagtcacattaagcagtattctagcacgcttcttggacagaatattttattacaggaactttgtcctaaacctatttctggccttattattgagctcatttagttcagacaatcttacagcaattgaagaag

SEQ ID NO: 574 - DNA, 9762 bp, Homo sapiens
  source 1..9762: mol_type = genomic DNA
cggggctgctacctccacgggcgcgccctggcaggaggggcgcagtctgcttgcaggcggtcgccagcgctccagcggcggctgtcggctttccaattccgccagctcggctgaggctgggctagcctgggtgccagtggctgctagcggcaggcgtcccctgagcaacaggagcccagagaaaaagaagcagccctgagagagcgccggggaaggagaggcccgcgccctctcctggagccagattctgcaggtgcactgggtggggatgatcggcgggctaggttgcaagcctcttatgtgaggagctgaagaggaattaaaatatacaggatgaaaagatggcaatgttgcctcccccaggacctcagagctttgtccatttcacaaaacagtctcttgccctcattgaacaacgcattgctgaaagaaaatcaaaggaacccaaagaagaaaagaaagatgatgatgaagaagccccaaagccaagcagtgacttggaagctggcaaacagctgcccttcatctatggggacattcctcccggcatggtgtcagagcccctggaggacttggacccctactatgcagacaaaaagactttcatagtattgaacaaagggaaaacaatcttccgtttcaatgccacacctgctttatatatgctttctcctttcagtcctctaagaagaatatctattaagattttagtacactccttattcagcatgctcatcatgtgcactattctgacaaactgcatatttatgaccatgaataacccaccggactggaccaaaaatgtcgagtacacttttactggaatatatacttttgaatcacttgtaaaaatccttgcaagaggcttctgtgtaggagaattcacttttcttcgtgacccgtggaactggctggattttgtcgtcattgtttttgcatatgtgacagagtttgtggacctgggcaatgtctcagcattgagaacattcagagttctccgagcattgaaaacaatttcagtcattccaggcctgaagacaattgtaggggctttgatccagtcagtgaagaagctttctgatgtcatgatcctgactgtgttctgtctgagtgtgtttgcactaattggactacagctgttcatgggaaacctgaagcataaatgttttcgaaattcacttgaaaataatgaaacattagaaagcataatgaataccctagagagtgaagaagactttagaaaatatttttattacttggaaggatccaaagatgctctcctttgtggtttcagcacagattcaggtcagtgtccagaggggtacacctgtgtgaaaattggcagaaaccctgattatggctacacgagctttgacactttcagctgggccttcttagccttgtttaggctaatgacccaagattactgggaaaacctttaccaacagacgctgcgtgctgctggcaaaacctacatgatcttctttgtcgtagtgattttcctgggctccttttatctaataaacttgatcctggctgtggttgccatggcatatgaagaacagaaccaggcaaacattgaagaagctaaacagaaagaattagaatttcaacagatgttagaccgtcttaaaaaagagcaagaagaagctgaggcaattgcagcggcagcggctgaatatacaagtattaggagaagcagaattatgggcctctcagagagttcttctgaaacatccaaactgagctctaaaagtgctaaagaaagaagaaacagaagaaagaaaaagaatcaaaagaagctctccagtggagaggaaaagggagatgctgagaaattgtcgaaatcagaatcagaggacagcatcagaagaaaaagtttccaccttggtgtcgaagggcataggcgagcacatgaaaagaggttgtctacccccaatcagtcaccactcagcattcgtggctccttgttttctgcaaggcgaagcagcagaacaagtctttttagtttcaaaggcagaggaagagatataggatctgagactgaatttgccgatgatgagcacagcatttttggagacaatgagagcagaaggggctcactgtttgtgccccacagaccccaggagcgacgcagcagtaacatcagccaagccagtaggtccccaccaatgctgccggtgaacgggaaaatgcacagtgctgtggactgcaacggtgtggtctccctggttgatggacgctcagccctcatgctccccaatggacagcttctgccagagggcacgaccaatcaaatacacaagaaaaggcgttgtagttcctatctcctttcagaggatatgctgaatgatcccaacctcagacagagagcaatgagtagagcaagcatattaacaaacactgtggaagaacttgaagagtccagacaaaaatgtccaccttggtggtacagatttgcacacaaattcttgatctggaattgctctccatattggataaaattcaaaaagtgtatctattttattgtaatggatccttttgtagatcttgcaattaccatttgcatagttttaaacacattatttatggctatggaacaccacccaatgactgaggaattcaaaaatgtacttgctataggaaatttggtctttactggaatctttgcagctgaaatggtattaaaactgattgccatggatccatatgagtatttccaagtaggctggaatatttttgacagccttattgtgactttaagtttagtggagctctttctagcagatgtggaaggattgtcagttctgcgatcattcagactgctccgagtcttcaagttggcaaaatcctggccaacattgaacatgctgattaagatcattggtaactcagtaggggctctaggtaacctcaccttagtgttggccatcatcgtcttcatttttgctgtggtcggcatgcagctctttggtaagagctacaaagaatgtgtctgcaagatcaatgatgactgtacgctcccacggtggcacatgaacgacttcttccactccttcctgattgtgttccgcgtgctgtgtggagagtggatagagaccatgtgggactgtatggaggtcgctggtcaagctatgtgccttattgtttacatgatggtcatggtcattggaaacctggtggtcctaaacctatttctggccttattattgagctcatttagttcagacaatcttacagcaattgaagaagaccctgatgcaaacaacctccagattgcagtgactagaattaaaaagggaataaattatgtgaaacaaaccttacgtgaatttattctaaaagcattttccaaaaagccaaagatttccagggagataagacaagcagaagatctgaatactaagaaggaaaactatatttctaaccatacacttgctgaaatgagcaaaggtcacaatttcctcaaggaaaaagataaaatcagtggttttggaagcagcgtggacaaacacttgatggaagacagtgatggtcaatcatttattcacaatcccagcctcacagtgacagtgccaattgcacctggggaatccgatttggaaaatatgaatgctgaggaacttagcagtgattcggatagtgaatacagcaaagtgagattaaaccggtcaagctcctcagagtgcagcacagttgataaccctttgcctggagaaggagaagaagcagaggctgaacctatgaattccgatgagccagaggcctgtttcacagatggttgtgtatggaggttctcatgctgccaagttaacatagagtcagggaaaggaaaaatctggtggaacatcaggaaaacctgctacaagattgttgaacacagttggtttgaaagcttcattgtcctcatgatcctgctcagcagtggtgccctggcttttgaagatatttatattgaaaggaaaaagaccattaagattatcctggagtatgcagacaagatcttcacttacatcttcattctggaaatgcttctaaaatggatagcatatggttataaaacatatttcaccaatgcctggtgttggctggatttcctaattgttgatgtttctttggttactttagtggcaaacactcttggctactcagatcttggccccattaaatcccttcggacactgagagctttaagacctctaagagccttatctagatttgaaggaatgagggtcgttgtgaatgcactcataggagcaattccttccatcatgaatgtgctacttgtgtgtcttatattctggctgatattcagcatcatgggagtaaatttgtttgctggcaagttctatgagtgtattaacaccacagatgggtcacggtttcctgcaagtcaagttccaaatcgttccgaatgttttgcccttatgaatgttagtcaaaatgtgcgatggaaaaacctgaaagtgaactttgataatgtcggacttggttacctatctctgcttcaagttgcaacttttaagggatggacgattattatgtatgcagcagtggattctgttaatgtagacaagcagcccaaatatgaatatagcctctacatgtatatttattttgtcgtctttatcatctttgggtcattcttcactttgaacttgttcattggtgtcatcatagataatttcaaccaacagaaaaagaagcttggaggtcaagacatctttatgacagaagaacagaagaaatactataatgcaatgaaaaagctggggtccaagaagccacaaaagccaattcctcgaccagggaacaaaatccaaggatgtatatttgacctagtgacaaatcaagcctttgatattagtatcatggttcttatctgtctcaacatggtaaccatgatggtagaaaaggagggtcaaagtcaacatatgactgaagttttatattggataaatgtggtttttataatccttttcactggagaatgtgtgctaaaactgatctccctcagacactactacttcactgtaggatggaatatttttgattttgtggttgtgattatctccattgtaggtatgtttctagctgatttgattgaaacgtattttgtgtcccctaccctgttccgagtgatccgtcttgccaggattggccgaatcctacgtctagtcaaaggagcaaaggggatccgcacgctgctctttgctttgatgatgtcccttcctgcgttgtttaacatcggcctcctgctcttcctggtcatgttcatctacgccatctttggaatgtccaactttgcctatgttaaaaaggaagatggaattaatgacatgttcaattttgagacctttggcaacagtatgatttgcctgttccaaattacaacctctgctggctgggatggattgctagcacctattcttaacagtaagccacccgactgtgacccaaaaaaagttcatcctggaagttcagttgaaggagactgtggtaacccatctgttggaatattctactttgttagttatatcatcatatccttcctggttgtggtgaacatgtacattgcagtcatactggagaattttagtgttgccactgaagaaagtactgaacctctgagtgaggatgactttgagatgttctatgaggtttgggagaagtttgatcccgatgcgacccagtttatagagttctctaaactctctgattttgcagctgccctggatcctcctcttctcatagcaaaacccaacaaagtccagctcattgccatggatctgcccatggttagtggtgaccggatccattgtcttgacatcttatttgcttttacaaagcgtgttttgggtgagagtggggagatggattctcttcgttcacagatggaagaaaggttcatgtctgcaaatccttccaaagtgtcctatgaacccatcacaaccacactaaaacggaaacaagaggatgtgtctgctactgtcattcagcgtgcttatagacgttaccgcttaaggcaaaatgtcaaaaatatatcaagtatatacataaaagatggagacagagatgatgatttactcaataaaaaagatatggcttttgataatgttaatgagaactcaagtccagaaaaaacagatgccacttcatccaccacctctccaccttcatatgatagtgtaacaaagccagacaaagagaaatatgaacaagacagaacagaaaaggaagacaaagggaaagacagcaaggaaagcaaaaaatagagcttcatttttgatatattgtttacagcctgtgaaagtgatttatttgtgttaataaaactcttttgaggaagtctatgccaaaatcctttttatcaaaatattctcgaaggcagtgcagtcactaactctgatttcctaagaaaggtgggcagcattagcagatggttatttttgcactgatgattctttaagaatcgtaagagaactctgtaggaattattgattatagcatacaaaagtgattcagttttttggtttttaataaatcagaagaccatgtagaaaacttttacatctgccttgtcatcttttcacaggattgtaattagtcttgtttcccatgtaaataaacaacacacgcatacagaaaaatctattatttatctattatttggaaatcaacaaaagtatttgccttggctttgcaatgaaatgcttgatagaagtaatggacattagttatgaatgtttagttaaaatgcattattagggagcttgactttttatcaatgtacagaggttattctatattttgaggtgcttaaatttattctacattgcatcagaaccaatttatatgtgcctataaaatgccatgggattaaaaatatatgtaggctattcatttctacaaatgtttttcattcatcttgactcacatgccaacaaggataagacttacctttagagtattgtgtttcatagcctttcttctttcatatccctttttgttcatagaataaccacagaacttgaaaaattattctaagtacatattacactcctcaaaaaaaacaaagataactgagaaaaaagttattgacagaagttctatttgctattatttacatagcctaacatttgactgtgctgcccaaaatactgataatagtctcttaaactcttttgtcaaattttcctgctttcttatgcagtattgtttagtcatcctttcgctgtaagcaaagttgatgaaatccttcctgatatgcagttagttgtttgaccacggtacatacttgagcagataataacttgggcacagtatttattgcatcacttgtatacaatcccgtgtttggcaagctttcaaatcatgtaatatgacagactttacacagatatgtgtttagtatgaataaaaaagcattgaaatagggattcttgccaacttgctctcttgccaccaacttactttcctaaattatggaagtaatcttttttggatatacttcaatgtatacaatgaggaagatgtcaccttctccttaaaattctatgatgtgaaatatattttgcctcaatcaacacagtaccatgggcttctaatttatcaagcacatattcattttgcattagctgtagacatctagttttttgaaaacacctattaatagtaatttgaaaagaaataaccataatgctttttttcgtgagtttatttcaggaatatgagatctttcttctataaagttattcatgcacaggcaaaaattgagctacacaggtagaatgtagttttacttagaagatttttgtgggaggttttgaagcaaatatataaaacaactttcactaatttgctttccatatttaaaaaataataaattacatttatataataaatgtttaaagcacatattttttgttgttctggcaatttaaaaagaaagaggatttaaacgtacctatagaaacaaagatttatggttaaagaatgagatcagaagtctagaatgtttttaaattgtgatatattttacaacatccgttattactttgagacatttgtcctaatctacgtataaaactcaatctagggctaaagattctttataccatcttaggttcattcatcttaggctatttgaaccactttttaatttaatatgaaagacaccatgcagtgttttccgagactacatagatcattttatcacatacctaccaagcctgttggaaataggttttgataatttaagtagggacctatacaaaatatattacatttatcagatttttaaatacattcaattaagaatttaacatcaccttaaatttgaattcaatctaccgttatttcaaactcacaaatataactgcattatgaatacttacataatgtagtaagacaagatgtttgacaggttcgtgtgtaattttctattaatgtttttacattgccttgtttttatgtaaaataaaaaatatgggcaactggtttgttaacaacacaatttcttcttagcatttcaaaaatatatataaagttgttctttttcctatttcatgaactatgtttttttttaaaataacatggttaagttttatatatatttacgtttgtttcaggaatgtctacttgtgactttttatcaattaaaaataatatttggaagaaagagcttattaagtataagcttgaagtaaaattagacctctctttccatgtagattactgtttgtactgatggtttcacccttcagaaggcactgtcatattaatatttaaattttataatcgctgaacttattacacccaacaatacagaaaggcagttacactgaagaacttaacttagaataaaatggaagcaaacaggttttctaaaaacttttttaagtgaccaggtctcgctctgtcacccaggctagagtgcaatggcatgatcatagctctctgcagcctcaactctgggctcaagcaaccctcctgcctcagcctcccaagtagctaagactacaggtacatgccaccatgcctggctaatatttaaatttttgtagataaggggtcttgctatgttgcccaggctagtctcaaactcctggcttcaagtgttcctactgtcatgacctgccaacatgctggggttacaggcatgagccaccatgccccaaacaggtttgaacacaaatctttcggatgaaaattagagaacctaattttagctttttgatagttacctagtttgcaaaagatttgggtgacttgtgagctgtttttaaatgctgattgttgaacatcacaacccaaaatacttagcatgattttatagagttttgatagctttattaaaaagagtgaaaataaaatgcatatgtaaataaagcagttctaaatagctatttcagagaaatgttaatagaagtgctgaaagaagggccaactaaattaggatggccagggaattggcctgggtttaggacctatgtatgaaggccaccaattttttaaaaatatctgtggtttattatgttattatcttcttgaggaaaacaatcaagaattgcttcatgaaaataaataaatagccatgaatatcataaagctgtttacataggattctttacaaatttcatagatctatgaatgctcaaaatgtttgagtttgccataaattatattgtagttatattgtagttatacttgagactgacacattgtaatataatctaagaataaaagttatacaaaataaaa

SEQ ID NO: 575 - DNA, 9795 bp, Homo sapiens
  source 1..9795: mol_type = genomic DNA
cggggctgctacctccacgggcgcgccctggcaggaggggcgcagtctgcttgcaggcggtcgccagcgctccagcggcggctgtcggctttccaattccgccagctcggctgaggctgggctagcctgggtgccagtggctgctagcggcaggcgtcccctgagcaacaggagcccagagaaaaagaagcagccctgagagagcgccggggaaggagaggcccgcgccctctcctggagccagattctgcaggtgcactgggtggggatgatcggcgggctaggttgcaagcctcttatgtgaggagctgaagaggaattaaaatatacaggatgaaaagatggcaatgttgcctcccccaggacctcagagctttgtccatttcacaaaacagtctcttgccctcattgaacaacgcattgctgaaagaaaatcaaaggaacccaaagaagaaaagaaagatgatgatgaagaagccccaaagccaagcagtgacttggaagctggcaaacagctgcccttcatctatggggacattcctcccggcatggtgtcagagcccctggaggacttggacccctactatgcagacaaaaagactttcatagtattgaacaaagggaaaacaatcttccgtttcaatgccacacctgctttatatatgctttctcctttcagtcctctaagaagaatatctattaagattttagtacactccttattcagcatgctcatcatgtgcactattctgacaaactgcatatttatgaccatgaataacccaccggactggaccaaaaatgtcgagtacacttttactggaatatatacttttgaatcacttgtaaaaatccttgcaagaggcttctgtgtaggagaattcacttttcttcgtgacccgtggaactggctggattttgtcgtcattgtttttgcatatgtgacagagtttgtggacctgggcaatgtctcagcattgagaacattcagagttctccgagcattgaaaacaatttcagtcattccaggcctgaagacaattgtaggggctttgatccagtcagtgaagaagctttctgatgtcatgatcctgactgtgttctgtctgagtgtgtttgcactaattggactacagctgttcatgggaaacctgaagcataaatgttttcgaaattcacttgaaaataatgaaacattagaaagcataatgaataccctagagagtgaagaagactttagaaaatatttttattacttggaaggatccaaagatgctctcctttgtggtttcagcacagattcaggtcagtgtccagaggggtacacctgtgtgaaaattggcagaaaccctgattatggctacacgagctttgacactttcagctgggccttcttagccttgtttaggctaatgacccaagattactgggaaaacctttaccaacagacgctgcgtgctgctggcaaaacctacatgatcttctttgtcgtagtgattttcctgggctccttttatctaataaacttgatcctggctgtggttgccatggcatatgaagaacagaaccaggcaaacattgaagaagctaaacagaaagaattagaatttcaacagatgttagaccgtcttaaaaaagagcaagaagaagctgaggcaattgcagcggcagcggctgaatatacaagtattaggagaagcagaattatgggcctctcagagagttcttctgaaacatccaaactgagctctaaaagtgctaaagaaagaagaaacagaagaaagaaaaagaatcaaaagaagctctccagtggagaggaaaagggagatgctgagaaattgtcgaaatcagaatcagaggacagcatcagaagaaaaagtttccaccttggtgtcgaagggcataggcgagcacatgaaaagaggttgtctacccccaatcagtcaccactcagcattcgtggctccttgttttctgcaaggcgaagcagcagaacaagtctttttagtttcaaaggcagaggaagagatataggatctgagactgaatttgccgatgatgagcacagcatttttggagacaatgagagcagaaggggctcactgtttgtgccccacagaccccaggagcgacgcagcagtaacatcagccaagccagtaggtccccaccaatgctgccggtgaacgggaaaatgcacagtgctgtggactgcaacggtgtggtctccctggttgatggacgctcagccctcatgctccccaatggacagcttctgccagaggtgataatagataaggcaacttctgatgacagcggcacgaccaatcaaatacacaagaaaaggcgttgtagttcctatctcctttcagaggatatgctgaatgatcccaacctcagacagagagcaatgagtagagcaagcatattaacaaacactgtggaagaacttgaagagtccagacaaaaatgtccaccttggtggtacagatttgcacacaaattcttgatctggaattgctctccatattggataaaattcaaaaagtgtatctattttattgtaatggatccttttgtagatcttgcaattaccatttgcatagttttaaacacattatttatggctatggaacaccacccaatgactgaggaattcaaaaatgtacttgctataggaaatttggtctttactggaatctttgcagctgaaatggtattaaaactgattgccatggatccatatgagtatttccaagtaggctggaatatttttgacagccttattgtgactttaagtttagtggagctctttctagcagatgtggaaggattgtcagttctgcgatcattcagactgctccgagtcttcaagttggcaaaatcctggccaacattgaacatgctgattaagatcattggtaactcagtaggggctctaggtaacctcaccttagtgttggccatcatcgtcttcatttttgctgtggtcggcatgcagctctttggtaagagctacaaagaatgtgtctgcaagatcaatgatgactgtacgctcccacggtggcacatgaacgacttcttccactccttcctgattgtgttccgcgtgctgtgtggagagtggatagagaccatgtgggactgtatggaggtcgctggtcaagctatgtgccttattgtttacatgatggtcatggtcattggaaacctggtggtcctaaacctatttctggccttattattgagctcatttagttcagacaatcttacagcaattgaagaagaccctgatgcaaacaacctccagattgcagtgactagaattaaaaagggaataaattatgtgaaacaaaccttacgtgaatttattctaaaagcattttccaaaaagccaaagatttccagggagataagacaagcagaagatctgaatactaagaaggaaaactatatttctaaccatacacttgctgaaatgagcaaaggtcacaatttcctcaaggaaaaagataaaatcagtggttttggaagcagcgtggacaaacacttgatggaagacagtgatggtcaatcatttattcacaatcccagcctcacagtgacagtgccaattgcacctggggaatccgatttggaaaatatgaatgctgaggaacttagcagtgattcggatagtgaatacagcaaagtgagattaaaccggtcaagctcctcagagtgcagcacagttgataaccctttgcctggagaaggagaagaagcagaggctgaacctatgaattccgatgagccagaggcctgtttcacagatggttgtgtatggaggttctcatgctgccaagttaacatagagtcagggaaaggaaaaatctggtggaacatcaggaaaacctgctacaagattgttgaacacagttggtttgaaagcttcattgtcctcatgatcctgctcagcagtggtgccctggcttttgaagatatttatattgaaaggaaaaagaccattaagattatcctggagtatgcagacaagatcttcacttacatcttcattctggaaatgcttctaaaatggatagcatatggttataaaacatatttcaccaatgcctggtgttggctggatttcctaattgttgatgtttctttggttactttagtggcaaacactcttggctactcagatcttggccccattaaatcccttcggacactgagagctttaagacctctaagagccttatctagatttgaaggaatgagggtcgttgtgaatgcactcataggagcaattccttccatcatgaatgtgctacttgtgtgtcttatattctggctgatattcagcatcatgggagtaaatttgtttgctggcaagttctatgagtgtattaacaccacagatgggtcacggtttcctgcaagtcaagttccaaatcgttccgaatgttttgcccttatgaatgttagtcaaaatgtgcgatggaaaaacctgaaagtgaactttgataatgtcggacttggttacctatctctgcttcaagttgcaacttttaagggatggacgattattatgtatgcagcagtggattctgttaatgtagacaagcagcccaaatatgaatatagcctctacatgtatatttattttgtcgtctttatcatctttgggtcattcttcactttgaacttgttcattggtgtcatcatagataatttcaaccaacagaaaaagaagcttggaggtcaagacatctttatgacagaagaacagaagaaatactataatgcaatgaaaaagctggggtccaagaagccacaaaagccaattcctcgaccagggaacaaaatccaaggatgtatatttgacctagtgacaaatcaagcctttgatattagtatcatggttcttatctgtctcaacatggtaaccatgatggtagaaaaggagggtcaaagtcaacatatgactgaagttttatattggataaatgtggtttttataatccttttcactggagaatgtgtgctaaaactgatctccctcagacactactacttcactgtaggatggaatatttttgattttgtggttgtgattatctccattgtaggtatgtttctagctgatttgattgaaacgtattttgtgtcccctaccctgttccgagtgatccgtcttgccaggattggccgaatcctacgtctagtcaaaggagcaaaggggatccgcacgctgctctttgctttgatgatgtcccttcctgcgttgtttaacatcggcctcctgctcttcctggtcatgttcatctacgccatctttggaatgtccaactttgcctatgttaaaaaggaagatggaattaatgacatgttcaattttgagacctttggcaacagtatgatttgcctgttccaaattacaacctctgctggctgggatggattgctagcacctattcttaacagtaagccacccgactgtgacccaaaaaaagttcatcctggaagttcagttgaaggagactgtggtaacccatctgttggaatattctactttgttagttatatcatcatatccttcctggttgtggtgaacatgtacattgcagtcatactggagaattttagtgttgccactgaagaaagtactgaacctctgagtgaggatgactttgagatgttctatgaggtttgggagaagtttgatcccgatgcgacccagtttatagagttctctaaactctctgattttgcagctgccctggatcctcctcttctcatagcaaaacccaacaaagtccagctcattgccatggatctgcccatggttagtggtgaccggatccattgtcttgacatcttatttgcttttacaaagcgtgttttgggtgagagtggggagatggattctcttcgttcacagatggaagaaaggttcatgtctgcaaatccttccaaagtgtcctatgaacccatcacaaccacactaaaacggaaacaagaggatgtgtctgctactgtcattcagcgtgcttatagacgttaccgcttaaggcaaaatgtcaaaaatatatcaagtatatacataaaagatggagacagagatgatgatttactcaataaaaaagatatggcttttgataatgttaatgagaactcaagtccagaaaaaacagatgccacttcatccaccacctctccaccttcatatgatagtgtaacaaagccagacaaagagaaatatgaacaagacagaacagaaaaggaagacaaagggaaagacagcaaggaaagcaaaaaatagagcttcatttttgatatattgtttacagcctgtgaaagtgatttatttgtgttaataaaactcttttgaggaagtctatgccaaaatcctttttatcaaaatattctcgaaggcagtgcagtcactaactctgatttcctaagaaaggtgggcagcattagcagatggttatttttgcactgatgattctttaagaatcgtaagagaactctgtaggaattattgattatagcatacaaaagtgattcagttttttggtttttaataaatcagaagaccatgtagaaaacttttacatctgccttgtcatcttttcacaggattgtaattagtcttgtttcccatgtaaataaacaacacacgcatacagaaaaatctattatttatctattatttggaaatcaacaaaagtatttgccttggctttgcaatgaaatgcttgatagaagtaatggacattagttatgaatgtttagttaaaatgcattattagggagcttgactttttatcaatgtacagaggttattctatattttgaggtgcttaaatttattctacattgcatcagaaccaatttatatgtgcctataaaatgccatgggattaaaaatatatgtaggctattcatttctacaaatgtttttcattcatcttgactcacatgccaacaaggataagacttacctttagagtattgtgtttcatagcctttcttctttcatatccctttttgttcatagaataaccacagaacttgaaaaattattctaagtacatattacactcctcaaaaaaaacaaagataactgagaaaaaagttattgacagaagttctatttgctattatttacatagcctaacatttgactgtgctgcccaaaatactgataatagtctcttaaactcttttgtcaaattttcctgctttcttatgcagtattgtttagtcatcctttcgctgtaagcaaagttgatgaaatccttcctgatatgcagttagttgtttgaccacggtacatacttgagcagataataacttgggcacagtatttattgcatcacttgtatacaatcccgtgtttggcaagctttcaaatcatgtaatatgacagactttacacagatatgtgtttagtatgaataaaaaagcattgaaatagggattcttgccaacttgctctcttgccaccaacttactttcctaaattatggaagtaatcttttttggatatacttcaatgtatacaatgaggaagatgtcaccttctccttaaaattctatgatgtgaaatatattttgcctcaatcaacacagtaccatgggcttctaatttatcaagcacatattcattttgcattagctgtagacatctagttttttgaaaacacctattaatagtaatttgaaaagaaataaccataatgctttttttcgtgagtttatttcaggaatatgagatctttcttctataaagttattcatgcacaggcaaaaattgagctacacaggtagaatgtagttttacttagaagatttttgtgggaggttttgaagcaaatatataaaacaactttcactaatttgctttccatatttaaaaaataataaattacatttatataataaatgtttaaagcacatattttttgttgttctggcaatttaaaaagaaagaggatttaaacgtacctatagaaacaaagatttatggttaaagaatgagatcagaagtctagaatgtttttaaattgtgatatattttacaacatccgttattactttgagacatttgtcctaatctacgtataaaactcaatctagggctaaagattctttataccatcttaggttcattcatcttaggctatttgaaccactttttaatttaatatgaaagacaccatgcagtgttttccgagactacatagatcattttatcacatacctaccaagcctgttggaaataggttttgataatttaagtagggacctatacaaaatatattacatttatcagatttttaaatacattcaattaagaatttaacatcaccttaaatttgaattcaatctaccgttatttcaaactcacaaatataactgcattatgaatacttacataatgtagtaagacaagatgtttgacaggttcgtgtgtaattttctattaatgtttttacattgccttgtttttatgtaaaataaaaaatatgggcaactggtttgttaacaacacaatttcttcttagcatttcaaaaatatatataaagttgttctttttcctatttcatgaactatgtttttttttaaaataacatggttaagttttatatatatttacgtttgtttcaggaatgtctacttgtgactttttatcaattaaaaataatatttggaagaaagagcttattaagtataagcttgaagtaaaattagacctctctttccatgtagattactgtttgtactgatggtttcacccttcagaaggcactgtcatattaatatttaaattttataatcgctgaacttattacacccaacaatacagaaaggcagttacactgaagaacttaacttagaataaaatggaagcaaacaggttttctaaaaacttttttaagtgaccaggtctcgctctgtcacccaggctagagtgcaatggcatgatcatagctctctgcagcctcaactctgggctcaagcaaccctcctgcctcagcctcccaagtagctaagactacaggtacatgccaccatgcctggctaatatttaaatttttgtagataaggggtcttgctatgttgcccaggctagtctcaaactcctggcttcaagtgttcctactgtcatgacctgccaacatgctggggttacaggcatgagccaccatgccccaaacaggtttgaacacaaatctttcggatgaaaattagagaacctaattttagctttttgatagttacctagtttgcaaaagatttgggtgacttgtgagctgtttttaaatgctgattgttgaacatcacaacccaaaatacttagcatgattttatagagttttgatagctttattaaaaagagtgaaaataaaatgcatatgtaaataaagcagttctaaatagctatttcagagaaatgttaatagaagtgctgaaagaagggccaactaaattaggatggccagggaattggcctgggtttaggacctatgtatgaaggccaccaattttttaaaaatatctgtggtttattatgttattatcttcttgaggaaaacaatcaagaattgcttcatgaaaataaataaatagccatgaatatcataaagctgtttacataggattctttacaaatttcatagatctatgaatgctcaaaatgtttgagtttgccataaattatattgtagttatattgtagttatacttgagactgacacattgtaatataatctaagaataaaagttatacaaaataaaa

SEQ ID NO: 576 - DNA, 9771 bp, Homo sapiens
  source 1..9771: mol_type = genomic DNA
cggggctgctacctccacgggcgcgccctggcaggaggggcgcagtctgcttgcaggcggtcgccagcgctccagcggcggctgtcggctttccaattccgccagctcggctgaggctgggctagcctgggtgccagtggctgctagcggcaggcgtcccctgagcaacaggagcccagagaaaaagaagcagccctgagagagcgccggggaaggagaggcccgcgccctctcctggagccagattctgcaggtgcactgggtggggatgatcggcgggctaggttgcaagcctcttatgtgaggagctgaagaggaattaaaatatacaggatgaaaagatggcaatgttgcctcccccaggacctcagagctttgtccatttcacaaaacagtctcttgccctcattgaacaacgcattgctgaaagaaaatcaaaggaacccaaagaagaaaagaaagatgatgatgaagaagccccaaagccaagcagtgacttggaagctggcaaacagctgcccttcatctatggggacattcctcccggcatggtgtcagagcccctggaggacttggacccctactatgcagacaaaaagactttcatagtattgaacaaagggaaaacaatcttccgtttcaatgccacacctgctttatatatgctttctcctttcagtcctctaagaagaatatctattaagattttagtacactccttattcagcatgctcatcatgtgcactattctgacaaactgcatatttatgaccatgaataacccaccggactggaccaaaaatgtcgagtacacttttactggaatatatacttttgaatcacttgtaaaaatccttgcaagaggcttctgtgtaggagaattcacttttcttcgtgacccgtggaactggctggattttgtcgtcattgtttttgcgtatttaacagaatttgtaaacctaggcaatgtttcagctcttcgaactttcagagtattgagagctttgaaaactatttctgtaatcccaggcctgaagacaattgtaggggctttgatccagtcagtgaagaagctttctgatgtcatgatcctgactgtgttctgtctgagtgtgtttgcactaattggactacagctgttcatgggaaacctgaagcataaatgttttcgaaattcacttgaaaataatgaaacattagaaagcataatgaataccctagagagtgaagaagactttagaaaatatttttattacttggaaggatccaaagatgctctcctttgtggtttcagcacagattcaggtcagtgtccagaggggtacacctgtgtgaaaattggcagaaaccctgattatggctacacgagctttgacactttcagctgggccttcttagccttgtttaggctaatgacccaagattactgggaaaacctttaccaacagacgctgcgtgctgctggcaaaacctacatgatcttctttgtcgtagtgattttcctgggctccttttatctaataaacttgatcctggctgtggttgccatggcatatgaagaacagaaccaggcaaacattgaagaagctaaacagaaagaattagaatttcaacagatgttagaccgtcttaaaaaagagcaagaagaagctgaggcaattgcagcggcagcggctgaatatacaagtattaggagaagcagaattatgggcctctcagagagttcttctgaaacatccaaactgagctctaaaagtgctaaagaaagaagaaacagaagaaagaaaaagaatcaaaagaagctctccagtggagaggaaaagggagatgctgagaaattgtcgaaatcagaatcagaggacagcatcagaagaaaaagtttccaccttggtgtcgaagggcataggcgagcacatgaaaagaggttgtctacccccaatcagtcaccactcagcattcgtggctccttgttttctgcaaggcgaagcagcagaacaagtctttttagtttcaaaggcagaggaagagatataggatctgagactgaatttgccgatgatgagcacagcatttttggagacaatgagagcagaaggggctcactgtttgtgccccacagaccccaggagcgacgcagcagtaacatcagccaagccagtaggtccccaccaatgctgccggtgaacgggaaaatgcacagtgctgtggactgcaacggtgtggtctccctggttgatggacgctcagccctcatgctccccaatggacagcttctgccagagggcacgaccaatcaaatacacaagaaaaggcgttgtagttcctatctcctttcagaggatatgctgaatgatcccaacctcagacagagagcaatgagtagagcaagcatattaacaaacactgtggaagaacttgaagagtccagacaaaaatgtccaccttggtggtacagatttgcacacaaattcttgatctggaattgctctccatattggataaaattcaaaaagtgtatctattttattgtaatggatccttttgtagatcttgcaattaccatttgcatagttttaaacacattatttatggctatggaacaccacccaatgactgaggaattcaaaaatgtacttgctataggaaatttggtctttactggaatctttgcagctgaaatggtattaaaactgattgccatggatccatatgagtatttccaagtaggctggaatatttttgacagccttattgtgactttaagtttagtggagctctttctagcagatgtggaaggattgtcagttctgcgatcattcagactgctccgagtcttcaagttggcaaaatcctggccaacattgaacatgctgattaagatcattggtaactcagtaggggctctaggtaacctcaccttagtgttggccatcatcgtcttcatttttgctgtggtcggcatgcagctctttggtaagagctacaaagaatgtgtctgcaagatcaatgatgactgtacgctcccacggtggcacatgaacgacttcttccactccttcctgattgtgttccgcgtgctgtgtggagagtggatagagaccatgtgggactgtatggaggtcgctggtcaagctatgtgccttattgtttacatgatggtcatggtcattggaaacctggtggtcctaaacctatttctggccttattattgagctcatttagttcagacaatcttacagcaattgaagaagaccctgatgcaaacaacctccagattgcagtgactagaattaaaaagggaataaattatgtgaaacaaaccttacgtgaatttattctaaaagcattttccaaaaagccaaagatttccagggagataagacaagcagaagatctgaatactaagaaggaaaactatatttctaaccatacacttgctgaaatgagcaaaggtcacaatttcctcaaggaaaaagataaaatcagtggttttggaagcagcgtggacaaacacttgatggaagacagtgatggtcaatcatttattcacaatcccagcctcacagtgacagtgccaattgcacctggggaatccgatttggaaaatatgaatgctgaggaacttagcagtgattcggatagtgaatacagcaaagtgagattaaaccggtcaagctcctcagagtgcagcacagttgataaccctttgcctggagaaggagaagaagcagaggctgaacctatgaattccgatgagccagaggcctgtttcacagatggttgtgtacggaggttctcatgctgccaagttaacatagagtcagggaaaggaaaaatctggtggaacatcaggaaaacctgctacaagattgttgaacacagttggtttgaaagcttcattgtcctcatgatcctgctcagcagtggtgccctggcttttgaagatatttatattgaaaggaaaaagaccattaagattatcctggagtatgcagacaagatcttcacttacatcttcattctggaaatgcttctaaaatggatagcatatggttataaaacatatttcaccaatgcctggtgttggctggatttcctaattgttgatgtttctttggttactttagtggcaaacactcttggctactcagatcttggccccattaaatcccttcggacactgagagctttaagacctctaagagccttatctagatttgaaggaatgagggtcgttgtgaatgcactcataggagcaattccttccatcatgaatgtgctacttgtgtgtcttatattctggctgatattcagcatcatgggagtaaatttgtttgctggcaagttctatgagtgtattaacaccacagatgggtcacggtttcctgcaagtcaagttccaaatcgttccgaatgttttgcccttatgaatgttagtcaaaatgtgcgatggaaaaacctgaaagtgaactttgataatgtcggacttggttacctatctctgcttcaagttgcaacttttaagggatggacgattattatgtatgcagcagtggattctgttaatgtagacaagcagcccaaatatgaatatagcctctacatgtatatttattttgtcgtctttatcatctttgggtcattcttcactttgaacttgttcattggtgtcatcatagataatttcaaccaacagaaaaagaagcttggaggtcaagacatctttatgacagaagaacagaagaaatactataatgcaatgaaaaagctggggtccaagaagccacaaaagccaattcctcgaccagggaacaaaatccaaggatgtatatttgacctagtgacaaatcaagcctttgatattagtatcatggttcttatctgtctcaacatggtaaccatgatggtagaaaaggagggtcaaagtcaacatatgactgaagttttatattggataaatgtggtttttataatccttttcactggagaatgtgtgctaaaactgatctccctcagacactactacttcactgtaggatggaatatttttgattttgtggttgtgattatctccattgtaggtatgtttctagctgatttgattgaaacgtattttgtgtcccctaccctgttccgagtgatccgtcttgccaggattggccgaatcctacgtctagtcaaaggagcaaaggggatccgcacgctgctctttgctttgatgatgtcccttcctgcgttgtttaacatcggcctcctgctcttcctggtcatgttcatctacgccatctttggaatgtccaactttgcctatgttaaaaaggaagatggaattaatgacatgttcaattttgagacctttggcaacagtatgatttgcctgttccaaattacaacctctgctggctgggatggattgctagcacctattcttaacagtaagccacccgactgtgacccaaaaaaagttcatcctggaagttcagttgaaggagactgtggtaacccatctgttggaatattctactttgttagttatatcatcatatccttcctggttgtggtgaacatgtacattgcagtcatactggagaattttagtgttgccactgaagaaagtactgaacctctgagtgaggatgactttgagatgttctatgaggtttgggagaagtttgatcccgatgcgacccagtttatagagttctctaaactctctgattttgcagctgccctggatcctcctcttctcatagcaaaacccaacaaagtccagctcattgccatggatctgcccatggttagtggtgaccggatccattgtcttgacatcttatttgcttttacaaagcgtgttttgggtgagagtggggagatggattctcttcgttcacagatggaagaaaggttcatgtctgcaaatccttccaaagtgtcctatgaacccatcacaaccacactaaaacggaaacaagaggatgtgtctgctactgtcattcagcgtgcttatagacgttaccgcttaaggcaaaatgtcaaaaatatatcaagtatatacataaaagatggagacagagatgatgatttactcaataaaaaagatatggcttttgataatgttaatgagaactcaagtccagaaaaaacagatgccacttcatccaccacctctccaccttcatatgatagtgtaacaaagccagacaaagagaaatatgaacaagacagaacagaaaaggaagacaaagggaaagacagcaaggaaagcaaaaaatagagcttcatttttgatatattgtttacagcctgtgaaagtgatttatttgtgttaataaaactcttttgaggaagtctatgccaaaatcctttttatcaaaatattctcgaaggcagtgcagtcactaactctgatttcctaagaaaggtgggcagcattagcagatggttatttttgcactgatgattctttaagaatcgtaagagaactctgtaggaattattgattatagcatacaaaagtgattcagttttttggtttttaataaatcagaagaccatgtagaaaacttttacatctgccttgtcatcttttcacaggattgtaattagtcttgtttcccatgtaaataaacaacacacgcatacagaaaaatctattatttatctattatttggaaatcaacaaaagtatttgccttggctttgcaatgaaatgcttgatagaagtaatggacattagttatgaatgtttagttaaaatgcattattagggagcttgactttttatcaatgtacagaggttattctatattttgaggtgcttaaatttattctacattgcatcagaaccaatttatatgtgcctataaaatgccatgggattaaaaatatatgtaggctattcatttctacaaatgtttttcattcatcttgactcacatgccaacaaggataagacttacctttagagtattgtgtttcatagcctttcttctttcatatccctttttgttcatagaataaccacagaacttgaaaaattattctaagtacatattacactcctcaaaaaaaacaaagataactgagaaaaaagttattgacagaagttctatttgctattatttacatagcctaacatttgactgtgctgcccaaaatactgataatagtctcttaaactcttttgtcaaattttcctgctttcttatgcagtattgtttagtcatcctttcgctgtaagcaaagttgatgaaatccttcctgatatgcagttagttgtttgaccacggtacatacttgagcagataataacttgggcacagtatttattgcatcacttgtatacaatcccgtgtttggcaagctttcaaatcatgtaatatgacagactttacacagatatgtgtttagtatgaataaaaaagcattgaaatagggattcttgccaacttgctctcttgccaccaacttactttcctaaattatggaagtaatcttttttggatatacttcaatgtatacaatgaggaagatgtcaccttctccttaaaattctatgatgtgaaatatattttgcctcaatcaacacagtaccatgggcttctaatttatcaagcacatattcattttgcattagctgtagacatctagttttttgaaaacacctattaatagtaatttgaaaagaaataaccataatgctttttttcgtgagtttatttcaggaatatgagatctttcttctataaagttattcatgcacaggcaaaaattgagctacacaggtagaatgtagttttacttagaagatttttgtgggaggttttgaagcaaatatataaaacaactttcactaatttgctttccatatttaaaaaataataaattacatttatataataaatgtttaaagcacatattttttgttgttctggcaatttaaaaagaaagaggatttaaacgtacctatagaaacaaagatttatggttaaagaatgagatcagaagtctagaatgtttttaaattgtgatatattttacaacatccgttattactttgagacatttgtcctaatctacgtataaaactcaatctagggctaaagattctttataccatcttaggttcattcatcttaggctatttgaaccactttttaatttaatatgaaagacaccatgcagtgttttccgagactacatagatcattttatcacatacctaccaagcctgttggaaataggttttgataatttaagtagggacctatacaaaatatattacatttatcagatttttaaatacattcaattaagaatttaacatcaccttaaatttgaattcaatctaccgttatttcaaactcacaaatataactgcattatgaatacttacataatgtagtaagacaagatgtttgacaggttcgtgtgtaattttctattaatgtttttacattgccttgtttttatgtaaaataaaaaatatgggcaactggtttgttaacaacacaatttcttcttagcatttcaaaaatatatataaagttgttctttttcctatttcatgaactatgtttttttttaaaataacatggttaagttttatatatatttacgtttgtttcaggaatgtctacttgtgactttttatcaattaaaaataatatttggaagaaagagcttattaagtataagcttgaagtaaaattagacctctctttccatgtagattactgtttgtactgatggtttcacccttcagaaggcactgtcatattaatatttaaattttataatcgctgaacttattacacccaacaatacagaaaggcagttacactgaagaacttaacttagaataaaatggaagcaaacaggttttctaaaaacttttttaagtgaccaggtctcgctctgtcacccaggctagagtgcaatggcatgatcatagctctctgcagcctcaactctgggctcaagcaaccctcctgcctcagcctcccaagtagctaagactacaggtacatgccaccatgcctggctaatatttaaatttttgtagataaggggtcttgctatgttgcccaggctagtctcaaactcctggcttcaagtgttcctactgtcatgacctgccaacatgctggggttacaggcatgagccaccatgccccaaacaggtttgaacacaaatctttcggatgaaaattagagaacctaattttagctttttgatagttacctagtttgcaaaagatttgggtgacttgtgagctgtttttaaatgctgattgttgaacatcacaacccaaaatacttagcatgattttatagagttttgatagctttattaaaaagagtgaaaataaaatgcatatgtaaataaagcagttctaaatagctatttcagagaaatgttaatagaagtgctgaaagaagggccaactaaattaggatggccagggaattggcctgggtttaggacctatgtatgaaggccaccaattttttaaaaatatctgtggtttattatgttattatcttcttgaggaaaacaatcaagaattgcttcatgaaaataaataaatagccatgaatatcataaagctgtttacataggattctttacaaatttcatagatctatgaatgctcaaaatgtttgagtttgccataaattatattgtagttatattgtagttatacttgagactgacacattgtaatataatctaagaataaaagttatacaaaataaaaaaaaaaaaa

SEQ ID NO: 577 - DNA, 9524 bp, Homo sapiens
  source 1..9524: mol_type = genomic DNA
cggggctgctacctccacgggcgcgccctggcaggaggggcgcagtctgcttgcaggcggtcgccagcgctccagcggcggctgtcggctttccaattccgccagctcggctgaggctgggctagcctgggtgccagtggctgctagcggcaggcgtcccctgagcaacaggagcccagagaaaaagaagcagccctgagagagcgccggggaaggagaggcccgcgccctctcctggagccagattctgcaggtgcactgggtggggatgatcggcgggctaggttgcaagcctcttatgtgaggagctgaagaggaattaaaatatacaggatgaaaagatggcaatgttgcctcccccaggacctcagagctttgtccatttcacaaaacagtctcttgccctcattgaacaacgcattgctgaaagaaaatcaaaggaacccaaagaagaaaagaaagatgatgatgaagaagccccaaagccaagcagtgacttggaagctggcaaacagctgcccttcatctatggggacattcctcccggcatggtgtcagagcccctggaggacttggacccctactatgcagacaaaaagactttcatagtattgaacaaagggaaaacaatcttccgtttcaatgccacacctgctttatatatgctttctcctttcagtcctctaagaagaatatctattaagattttagtacactccttattcagcatgctcatcatgtgcactattctgacaaactgcatatttatgaccatgaataacccaccggactggaccaaaaatgtcgagtacacttttactggaatatatacttttgaatcacttgtaaaaatccttgcaagaggcttctgtgtaggagaattcacttttcttcgtgacccgtggaactggctggattttgtcgtcattgtttttgcgtatttaacagaatttgtaaacctaggcaatgtttcagctcttcgaactttcagagtattgagagctttgaaaactatttctgtaatcccaggcctgaagacaattgtaggggctttgatccagtcagtgaagaagctttctgatgtcatgatcctgactgtgttctgtctgagtgtgtttgcactaattggactacagctgttcatgggaaacctgaagcataaatgttttcgaaattcacttgaaaataatgaaacattagaaagcataatgaataccctagagagtgaagaagactttagaaaatatttttattacttggaaggatccaaagatgctctcctttgtggtttcagcacagattcaggtcagtgtccagaggggtacacctgtgtgaaaattggcagaaaccctgattatggctacacgagctttgacactttcagctgggccttcttagccttgtttaggctaatgacccaagattactgggaaaacctttaccaacagacgctgcgtgctgctggcaaaacctacatgatcttctttgtcgtagtgattttcctgggctccttttatctaataaacttgatcctggctgtggttgccatggcatatgaagaacagaaccaggcaaacattgaagaagctaaacagaaagaattagaatttcaacagatgttagaccgtcttaaaaaagagcaagaagaagctgaggcaattgcagcggcagcggctgaatatacaagtattaggagaagcagaattatgggcctctcagagagttcttctgaaacatccaaactgagctctaaaagtgctaaagaaagaagaaacagaagaaagaaaaagaatcaaaagaagctctccagtggagaggaaaagggagatgctgagaaattgtcgaaatcagaatcagaggacagcatcagaagaaaaagtttccaccttggtgtcgaagggcataggcgagcacatgaaaagaggttgtctacccccaatcagtcaccactcagcattcgtggctccttgttttctgcaaggcgaagcagcagaacaagtctttttagtttcaaaggcagaggaagagatataggatctgagactgaatttgccgatgatgagcacagcatttttggagacaatgagagcagaaggggctcactgtttgtgccccacagaccccaggagcgacgcagcagtaacatcagccaagccagtaggtccccaccaatgctgccggtgaacgggaaaatgcacagtgctgtggactgcaacggtgtggtctccctggttgatggacgctcagccctcatgctccccaatggacagcttctgccagaggtgataatagataaggcaacttctgatgacagcggcacgaccaatcaaatacacaagaaaaggcgttgtagttcctatctcctttcagaggatatgctgaatgatcccaacctcagacagagagcaatgagtagagcaagcatattaacaaacactgtggaagaacttgaagagtccagacaaaaatgtccaccttggtggtacagatttgcacacaaattcttgatctggaattgctctccatattggataaaattcaaaaagtgtatctattttattgtaatggatccttttgtagatcttgcaattaccatttgcatagttttaaacacattatttatggctatggaacaccacccaatgactgaggaattcaaaaatgtacttgctataggaaatttggtctttactggaatctttgcagctgaaatggtattaaaactgattgccatggatccatatgagtatttccaagtaggctggaatatttttgacagccttattgtgactttaagtttagtggagctctttctagcagatgtggaaggattgtcagttctgcgatcattcagactgctccgagtcttcaagttggcaaaatcctggccaacattgaacatgctgattaagatcattggtaactcagtaggggctctaggtaacctcaccttagtgttggccatcatcgtcttcatttttgctgtggtcggcatgcagctctttggtaagagctacaaagaatgtgtctgcaagatcaatgatgactgtacgctcccacggtggcacatgaacgacttcttccactccttcctgattgtgttccgcgtgctgtgtggagagtggatagagaccatgtgggactgtatggaggtcgctggtcaagctatgtgccttattgtttacatgatggtcatggtcattggaaacctggtggtcctaaacctatttctggccttattattgagctcatttagttcagacaatcttacagcaattgaagaagaccctgatgcaaacaacctccagattgcagtgactagaattaaaaagggaataaattatgtgaaacaaaccttacgtgaatttattctaaaagcattttccaaaaagccaaagatttccagggagataagacaagcagaagatctgaatactaagaaggaaaactatatttctaaccatacacttgctgaaatgagcaaaggtcacaatttcctcaaggaaaaagataaaatcagtggttttggaagcagcgtggacaaacacttgatggaagacagtgatggtcaatcatttattcacaatcccagcctcacagtgacagtgccaattgcacctggggaatccgatttggaaaatatgaatgctgaggaacttagcagtgattcggatagtgaatacagcaaagtgagattaaaccggtcaagctcctcagagtgcagcacagttgataaccctttgcctggagaaggagaagaagcagaggctgaacctatgaattccgatgagccagaggcctgtttcacagatggttgtgtatggaggttctcatgctgccaagttaacatagagtcagggaaaggaaaaatctggtggaacatcaggaaaacctgctacaagattgttgaacacagttggtttgaaagcttcattgtcctcatgatcctgctcagcagtggtgccctggcttttgaagatatttatattgaaaggaaaaagaccattaagattatcctggagtatgcagacaagatcttcacttacatcttcattctggaaatgcttctaaaatggatagcatatggttataaaacatatttcaccaatgcctggtgttggctggatttcctaattgttgatgtttctttggttactttagtggcaaacactcttggctactcagatcttggccccattaaatcccttcggacactgagagctttaagacctctaagagccttatctagatttgaaggaatgagggtcgttgtgaatgcactcataggagcaattccttccatcatgaatgtgctacttgtgtgtcttatattctggctgatattcagcatcatgggagtaaatttgtttgctggcaagttctatgagtgtattaacaccacagatgggtcacggtttcctgcaagtcaagttccaaatcgttccgaatgttttgcccttatgaatgttagtcaaaatgtgcgatggaaaaacctgaaagtgaactttgataatgtcggacttggttacctatctctgcttcaagttgcaacttttaagggatggacgattattatgtatgcagcagtggattctgttaatgtagacaagcagcccaaatatgaatatagcctctacatgtatatttattttgtcgtctttatcatctttgggtcattcttcactttgaacttgttcattggtgtcatcatagataatttcaaccaacagaaaaagaagcttggaggtcaagacatctttatgacagaagaacagaagaaatactataatgcaatgaaaaagctggggtccaagaagccacaaaagccaattcctcgaccaggggtatgtttctagctgatttgattgaaacgtattttgtgtcccctaccctgttccgagtgatccgtcttgccaggattggccgaatcctacgtctagtcaaaggagcaaaggggatccgcacgctgctctttgctttgatgatgtcccttcctgcgttgtttaacatcggcctcctgctcttcctggtcatgttcatctacgccatctttggaatgtccaactttgcctatgttaaaaaggaagatggaattaatgacatgttcaattttgagacctttggcaacagtatgatttgcctgttccaaattacaacctctgctggctgggatggattgctagcacctattcttaacagtaagccacccgactgtgacccaaaaaaagttcatcctggaagttcagttgaaggagactgtggtaacccatctgttggaatattctactttgttagttatatcatcatatccttcctggttgtggtgaacatgtacattgcagtcatactggagaattttagtgttgccactgaagaaagtactgaacctctgagtgaggatgactttgagatgttctatgaggtttgggagaagtttgatcccgatgcgacccagtttatagagttctctaaactctctgattttgcagctgccctggatcctcctcttctcatagcaaaacccaacaaagtccagctcattgccatggatctgcccatggttagtggtgaccggatccattgtcttgacatcttatttgcttttacaaagcgtgttttgggtgagagtggggagatggattctcttcgttcacagatggaagaaaggttcatgtctgcaaatccttccaaagtgtcctatgaacccatcacaaccacactaaaacggaaacaagaggatgtgtctgctactgtcattcagcgtgcttatagacgttaccgcttaaggcaaaatgtcaaaaatatatcaagtatatacataaaagatggagacagagatgatgatttactcaataaaaaagatatggcttttgataatgttaatgagaactcaagtccagaaaaaacagatgccacttcatccaccacctctccaccttcatatgatagtgtaacaaagccagacaaagagaaatatgaacaagacagaacagaaaaggaagacaaagggaaagacagcaaggaaagcaaaaaatagagcttcatttttgatatattgtttacagcctgtgaaagtgatttatttgtgttaataaaactcttttgaggaagtctatgccaaaatcctttttatcaaaatattctcgaaggcagtgcagtcactaactctgatttcctaagaaaggtgggcagcattagcagatggttatttttgcactgatgattctttaagaatcgtaagagaactctgtaggaattattgattatagcatacaaaagtgattcagttttttggtttttaataaatcagaagaccatgtagaaaacttttacatctgccttgtcatcttttcacaggattgtaattagtcttgtttcccatgtaaataaacaacacacgcatacagaaaaatctattatttatctattatttggaaatcaacaaaagtatttgccttggctttgcaatgaaatgcttgatagaagtaatggacattagttatgaatgtttagttaaaatgcattattagggagcttgactttttatcaatgtacagaggttattctatattttgaggtgcttaaatttattctacattgcatcagaaccaatttatatgtgcctataaaatgccatgggattaaaaatatatgtaggctattcatttctacaaatgtttttcattcatcttgactcacatgccaacaaggataagacttacctttagagtattgtgtttcatagcctttcttctttcatatccctttttgttcatagaataaccacagaacttgaaaaattattctaagtacatattacactcctcaaaaaaaacaaagataactgagaaaaaagttattgacagaagttctatttgctattatttacatagcctaacatttgactgtgctgcccaaaatactgataatagtctcttaaactcttttgtcaaattttcctgctttcttatgcagtattgtttagtcatcctttcgctgtaagcaaagttgatgaaatccttcctgatatgcagttagttgtttgaccacggtacatacttgagcagataataacttgggcacagtatttattgcatcacttgtatacaatcccgtgtttggcaagctttcaaatcatgtaatatgacagactttacacagatatgtgtttagtatgaataaaaaagcattgaaatagggattcttgccaacttgctctcttgccaccaacttactttcctaaattatggaagtaatcttttttggatatacttcaatgtatacaatgaggaagatgtcaccttctccttaaaattctatgatgtgaaatatattttgcctcaatcaacacagtaccatgggcttctaatttatcaagcacatattcattttgcattagctgtagacatctagttttttgaaaacacctattaatagtaatttgaaaagaaataaccataatgctttttttcgtgagtttatttcaggaatatgagatctttcttctataaagttattcatgcacaggcaaaaattgagctacacaggtagaatgtagttttacttagaagatttttgtgggaggttttgaagcaaatatataaaacaactttcactaatttgctttccatatttaaaaaataataaattacatttatataataaatgtttaaagcacatattttttgttgttctggcaatttaaaaagaaagaggatttaaacgtacctatagaaacaaagatttatggttaaagaatgagatcagaagtctagaatgtttttaaattgtgatatattttacaacatccgttattactttgagacatttgtcctaatctacgtataaaactcaatctagggctaaagattctttataccatcttaggttcattcatcttaggctatttgaaccactttttaatttaatatgaaagacaccatgcagtgttttccgagactacatagatcattttatcacatacctaccaagcctgttggaaataggttttgataatttaagtagggacctatacaaaatatattacatttatcagatttttaaatacattcaattaagaatttaacatcaccttaaatttgaattcaatctaccgttatttcaaactcacaaatataactgcattatgaatacttacataatgtagtaagacaagatgtttgacaggttcgtgtgtaattttctattaatgtttttacattgccttgtttttatgtaaaataaaaaatatgggcaactggtttgttaacaacacaatttcttcttagcatttcaaaaatatatataaagttgttctttttcctatttcatgaactatgtttttttttaaaataacatggttaagttttatatatatttacgtttgtttcaggaatgtctacttgtgactttttatcaattaaaaataatatttggaagaaagagcttattaagtataagcttgaagtaaaattagacctctctttccatgtagattactgtttgtactgatggtttcacccttcagaaggcactgtcatattaatatttaaattttataatcgctgaacttattacacccaacaatacagaaaggcagttacactgaagaacttaacttagaataaaatggaagcaaacaggttttctaaaaacttttttaagtgaccaggtctcgctctgtcacccaggctagagtgcaatggcatgatcatagctctctgcagcctcaactctgggctcaagcaaccctcctgcctcagcctcccaagtagctaagactacaggtacatgccaccatgcctggctaatatttaaatttttgtagataaggggtcttgctatgttgcccaggctagtctcaaactcctggcttcaagtgttcctactgtcatgacctgccaacatgctggggttacaggcatgagccaccatgccccaaacaggtttgaacacaaatctttcggatgaaaattagagaacctaattttagctttttgatagttacctagtttgcaaaagatttgggtgacttgtgagctgtttttaaatgctgattgttgaacatcacaacccaaaatacttagcatgattttatagagttttgatagctttattaaaaagagtgaaaataaaatgcatatgtaaataaagcagttctaaatagctatttcagagaaatgttaatagaagtgctgaaagaagggccaactaaattaggatggccagggaattggcctgggtttaggacctatgtatgaaggccaccaattttttaaaaatatctgtggtttattatgttattatcttcttgaggaaaacaatcaagaattgcttcatgaaaataaataaatagccatgaatatcataaagctgtttacataggattctttacaaatttcatagatctatgaatgctcaaaatgtttgagtttgccataaattatattgtagttatattgtagttatacttgagactgacacattgtaatataatctaagaataaaagttatacaaaataaaa

SEQ ID NO: 578 - DNA, 9714 bp, Homo sapiens
  source 1..9714: mol_type = genomic DNA
agtctgcttgcaggcggtcgccagcgctccagcggcggctgtcggctttccaattccgccagctcggctgaggctgggctagcctgggtgccagtggctgctagcggcaggcgtcccctgagcaacaggagcccagagaaaaagaagcagccctgagagagcgccggggaaggagaggcccgcgccctctcctggagccagattctgcaggcctcttatgtgaggagctgaagaggaattaaaatatacaggatgaaaagatggcaatgttgcctcccccaggacctcagagctttgtccatttcacaaaacagtctcttgccctcattgaacaacgcattgctgaaagaaaatcaaaggaacccaaagaagaaaagaaagatgatgatgaagaagccccaaagccaagcagtgacttggaagctggcaaacagctgcccttcatctatggggacattcctcccggcatggtgtcagagcccctggaggacttggacccctactatgcagacaaaaagactttcatagtattgaacaaagggaaaacaatcttccgtttcaatgccacacctgctttatatatgctttctcctttcagtcctctaagaagaatatctattaagattttagtacactccttattcagcatgctcatcatgtgcactattctgacaaactgcatatttatgaccatgaataacccaccggactggaccaaaaatgtcgagtacacttttactggaatatatacttttgaatcacttgtaaaaatccttgcaagaggcttctgtgtaggagaattcacttttcttcgtgacccgtggaactggctggattttgtcgtcattgtttttgcgtatttaacagaatttgtaaacctaggcaatgtttcagctcttcgaactttcagagtattgagagctttgaaaactatttctgtaatcccaggcctgaagacaattgtaggggctttgatccagtcagtgaagaagctttctgatgtcatgatcctgactgtgttctgtctgagtgtgtttgcactaattggactacagctgttcatgggaaacctgaagcataaatgttttcgaaattcacttgaaaataatgaaacattagaaagcataatgaataccctagagagtgaagaagactttagaaaatatttttattacttggaaggatccaaagatgctctcctttgtggtttcagcacagattcaggtcagtgtccagaggggtacacctgtgtgaaaattggcagaaaccctgattatggctacacgagctttgacactttcagctgggccttcttagccttgtttaggctaatgacccaagattactgggaaaacctttaccaacagacgctgcgtgctgctggcaaaacctacatgatcttctttgtcgtagtgattttcctgggctccttttatctaataaacttgatcctggctgtggttgccatggcatatgaagaacagaaccaggcaaacattgaagaagctaaacagaaagaattagaatttcaacagatgttagaccgtcttaaaaaagagcaagaagaagctgaggcaattgcagcggcagcggctgaatatacaagtattaggagaagcagaattatgggcctctcagagagttcttctgaaacatccaaactgagctctaaaagtgctaaagaaagaagaaacagaagaaagaaaaagaatcaaaagaagctctccagtggagaggaaaagggagatgctgagaaattgtcgaaatcagaatcagaggacagcatcagaagaaaaagtttccaccttggtgtcgaagggcataggcgagcacatgaaaagaggttgtctacccccaatcagtcaccactcagcattcgtggctccttgttttctgcaaggcgaagcagcagaacaagtctttttagtttcaaaggcagaggaagagatataggatctgagactgaatttgccgatgatgagcacagcatttttggagacaatgagagcagaaggggctcactgtttgtgccccacagaccccaggagcgacgcagcagtaacatcagccaagccagtaggtccccaccaatgctgccggtgaacgggaaaatgcacagtgctgtggactgcaacggtgtggtctccctggttgatggacgctcagccctcatgctccccaatggacagcttctgccagaggtgataatagataaggcaacttctgatgacagcggcacgaccaatcaaatacacaagaaaaggcgttgtagttcctatctcctttcagaggatatgctgaatgatcccaacctcagacagagagcaatgagtagagcaagcatattaacaaacactgtggaagaacttgaagagtccagacaaaaatgtccaccttggtggtacagatttgcacacaaattcttgatctggaattgctctccatattggataaaattcaaaaagtgtatctattttattgtaatggatccttttgtagatcttgcaattaccatttgcatagttttaaacacattatttatggctatggaacaccacccaatgactgaggaattcaaaaatgtacttgctataggaaatttggtctttactggaatctttgcagctgaaatggtattaaaactgattgccatggatccatatgagtatttccaagtaggctggaatatttttgacagccttattgtgactttaagtttagtggagctctttctagcagatgtggaaggattgtcagttctgcgatcattcagactgctccgagtcttcaagttggcaaaatcctggccaacattgaacatgctgattaagatcattggtaactcagtaggggctctaggtaacctcaccttagtgttggccatcatcgtcttcatttttgctgtggtcggcatgcagctctttggtaagagctacaaagaatgtgtctgcaagatcaatgatgactgtacgctcccacggtggcacatgaacgacttcttccactccttcctgattgtgttccgcgtgctgtgtggagagtggatagagaccatgtgggactgtatggaggtcgctggtcaagctatgtgccttattgtttacatgatggtcatggtcattggaaacctggtggtcctaaacctatttctggccttattattgagctcatttagttcagacaatcttacagcaattgaagaagaccctgatgcaaacaacctccagattgcagtgactagaattaaaaagggaataaattatgtgaaacaaaccttacgtgaatttattctaaaagcattttccaaaaagccaaagatttccagggagataagacaagcagaagatctgaatactaagaaggaaaactatatttctaaccatacacttgctgaaatgagcaaaggtcacaatttcctcaaggaaaaagataaaatcagtggttttggaagcagcgtggacaaacacttgatggaagacagtgatggtcaatcatttattcacaatcccagcctcacagtgacagtgccaattgcacctggggaatccgatttggaaaatatgaatgctgaggaacttagcagtgattcggatagtgaatacagcaaagtgagattaaaccggtcaagctcctcagagtgcagcacagttgataaccctttgcctggagaaggagaagaagcagaggctgaacctatgaattccgatgagccagaggcctgtttcacagatggttgtgtatggaggttctcatgctgccaagttaacatagagtcagggaaaggaaaaatctggtggaacatcaggaaaacctgctacaagattgttgaacacagttggtttgaaagcttcattgtcctcatgatcctgctcagcagtggtgccctggcttttgaagatatttatattgaaaggaaaaagaccattaagattatcctggagtatgcagacaagatcttcacttacatcttcattctggaaatgcttctaaaatggatagcatatggttataaaacatatttcaccaatgcctggtgttggctggatttcctaattgttgatgtttctttggttactttagtggcaaacactcttggctactcagatcttggccccattaaatcccttcggacactgagagctttaagacctctaagagccttatctagatttgaaggaatgagggtcgttgtgaatgcactcataggagcaattccttccatcatgaatgtgctacttgtgtgtcttatattctggctgatattcagcatcatgggagtaaatttgtttgctggcaagttctatgagtgtattaacaccacagatgggtcacggtttcctgcaagtcaagttccaaatcgttccgaatgttttgcccttatgaatgttagtcaaaatgtgcgatggaaaaacctgaaagtgaactttgataatgtcggacttggttacctatctctgcttcaagttgcaacttttaagggatggacgattattatgtatgcagcagtggattctgttaatgtagacaagcagcccaaatatgaatatagcctctacatgtatatttattttgtcgtctttatcatctttgggtcattcttcactttgaacttgttcattggtgtcatcatagataatttcaaccaacagaaaaagaagcttggaggtcaagacatctttatgacagaagaacagaagaaatactataatgcaatgaaaaagctggggtccaagaagccacaaaagccaattcctcgaccagggaacaaaatccaaggatgtatatttgacctagtgacaaatcaagcctttgatattagtatcatggttcttatctgtctcaacatggtaaccatgatggtagaaaaggagggtcaaagtcaacatatgactgaagttttatattggataaatgtggtttttataatccttttcactggagaatgtgtgctaaaactgatctccctcagacactactacttcactgtaggatggaatatttttgattttgtggttgtgattatctccattgtaggtatgtttctagctgatttgattgaaacgtattttgtgtcccctaccctgttccgagtgatccgtcttgccaggattggccgaatcctacgtctagtcaaaggagcaaaggggatccgcacgctgctctttgctttgatgatgtcccttcctgcgttgtttaacatcggcctcctgctcttcctggtcatgttcatctacgccatctttggaatgtccaactttgcctatgttaaaaaggaagatggaattaatgacatgttcaattttgagacctttggcaacagtatgatttgcctgttccaaattacaacctctgctggctgggatggattgctagcacctattcttaacagtaagccacccgactgtgacccaaaaaaagttcatcctggaagttcagttgaaggagactgtggtaacccatctgttggaatattctactttgttagttatatcatcatatccttcctggttgtggtgaacatgtacattgcagtcatactggagaattttagtgttgccactgaagaaagtactgaacctctgagtgaggatgactttgagatgttctatgaggtttgggagaagtttgatcccgatgcgacccagtttatagagttctctaaactctctgattttgcagctgccctggatcctcctcttctcatagcaaaacccaacaaagtccagctcattgccatggatctgcccatggttagtggtgaccggatccattgtcttgacatcttatttgcttttacaaagcgtgttttgggtgagagtggggagatggattctcttcgttcacagatggaagaaaggttcatgtctgcaaatccttccaaagtgtcctatgaacccatcacaaccacactaaaacggaaacaagaggatgtgtctgctactgtcattcagcgtgcttatagacgttaccgcttaaggcaaaatgtcaaaaatatatcaagtatatacataaaagatggagacagagatgatgatttactcaataaaaaagatatggcttttgataatgttaatgagaactcaagtccagaaaaaacagatgccacttcatccaccacctctccaccttcatatgatagtgtaacaaagccagacaaagagaaatatgaacaagacagaacagaaaaggaagacaaagggaaagacagcaaggaaagcaaaaaatagagcttcatttttgatatattgtttacagcctgtgaaagtgatttatttgtgttaataaaactcttttgaggaagtctatgccaaaatcctttttatcaaaatattctcgaaggcagtgcagtcactaactctgatttcctaagaaaggtgggcagcattagcagatggttatttttgcactgatgattctttaagaatcgtaagagaactctgtaggaattattgattatagcatacaaaagtgattcagttttttggtttttaataaatcagaagaccatgtagaaaacttttacatctgccttgtcatcttttcacaggattgtaattagtcttgtttcccatgtaaataaacaacacacgcatacagaaaaatctattatttatctattatttggaaatcaacaaaagtatttgccttggctttgcaatgaaatgcttgatagaagtaatggacattagttatgaatgtttagttaaaatgcattattagggagcttgactttttatcaatgtacagaggttattctatattttgaggtgcttaaatttattctacattgcatcagaaccaatttatatgtgcctataaaatgccatgggattaaaaatatatgtaggctattcatttctacaaatgtttttcattcatcttgactcacatgccaacaaggataagacttacctttagagtattgtgtttcatagcctttcttctttcatatccctttttgttcatagaataaccacagaacttgaaaaattattctaagtacatattacactcctcaaaaaaaacaaagataactgagaaaaaagttattgacagaagttctatttgctattatttacatagcctaacatttgactgtgctgcccaaaatactgataatagtctcttaaactcttttgtcaaattttcctgctttcttatgcagtattgtttagtcatcctttcgctgtaagcaaagttgatgaaatccttcctgatatgcagttagttgtttgaccacggtacatacttgagcagataataacttgggcacagtatttattgcatcacttgtatacaatcccgtgtttggcaagctttcaaatcatgtaatatgacagactttacacagatatgtgtttagtatgaataaaaaagcattgaaatagggattcttgccaacttgctctcttgccaccaacttactttcctaaattatggaagtaatcttttttggatatacttcaatgtatacaatgaggaagatgtcaccttctccttaaaattctatgatgtgaaatatattttgcctcaatcaacacagtaccatgggcttctaatttatcaagcacatattcattttgcattagctgtagacatctagttttttgaaaacacctattaatagtaatttgaaaagaaataaccataatgctttttttcgtgagtttatttcaggaatatgagatctttcttctataaagttattcatgcacaggcaaaaattgagctacacaggtagaatgtagttttacttagaagatttttgtgggaggttttgaagcaaatatataaaacaactttcactaatttgctttccatatttaaaaaataataaattacatttatataataaatgtttaaagcacatattttttgttgttctggcaatttaaaaagaaagaggatttaaacgtacctatagaaacaaagatttatggttaaagaatgagatcagaagtctagaatgtttttaaattgtgatatattttacaacatccgttattactttgagacatttgtcctaatctacgtataaaactcaatctagggctaaagattctttataccatcttaggttcattcatcttaggctatttgaaccactttttaatttaatatgaaagacaccatgcagtgttttccgagactacatagatcattttatcacatacctaccaagcctgttggaaataggttttgataatttaagtagggacctatacaaaatatattacatttatcagatttttaaatacattcaattaagaatttaacatcaccttaaatttgaattcaatctaccgttatttcaaactcacaaatataactgcattatgaatacttacataatgtagtaagacaagatgtttgacaggttcgtgtgtaattttctattaatgtttttacattgccttgtttttatgtaaaataaaaaatatgggcaactggtttgttaacaacacaatttcttcttagcatttcaaaaatatatataaagttgttctttttcctatttcatgaactatgtttttttttaaaataacatggttaagttttatatatatttacgtttgtttcaggaatgtctacttgtgactttttatcaattaaaaataatatttggaagaaagagcttattaagtataagcttgaagtaaaattagacctctctttccatgtagattactgtttgtactgatggtttcacccttcagaaggcactgtcatattaatatttaaattttataatcgctgaacttattacacccaacaatacagaaaggcagttacactgaagaacttaacttagaataaaatggaagcaaacaggttttctaaaaacttttttaagtgaccaggtctcgctctgtcacccaggctagagtgcaatggcatgatcatagctctctgcagcctcaactctgggctcaagcaaccctcctgcctcagcctcccaagtagctaagactacaggtacatgccaccatgcctggctaatatttaaatttttgtagataaggggtcttgctatgttgcccaggctagtctcaaactcctggcttcaagtgttcctactgtcatgacctgccaacatgctggggttacaggcatgagccaccatgccccaaacaggtttgaacacaaatctttcggatgaaaattagagaacctaattttagctttttgatagttacctagtttgcaaaagatttgggtgacttgtgagctgtttttaaatgctgattgttgaacatcacaacccaaaatacttagcatgattttatagagttttgatagctttattaaaaagagtgaaaataaaatgcatatgtaaataaagcagttctaaatagctatttcagagaaatgttaatagaagtgctgaaagaagggccaactaaattaggatggccagggaattggcctgggtttaggacctatgtatgaaggccaccaattttttaaaaatatctgtggtttattatgttattatcttcttgaggaaaacaatcaagaattgcttcatgaaaataaataaatagccatgaatatcataaagctgtttacataggattctttacaaatttcatagatctatgaatgctcaaaatgtttgagtttgccataaattatattgtagttatattgtagttatacttgagactgacacattgtaatataatctaagaataaaagttatacaaaataaaa

SEQ ID NO: 579 - DNA, 9752 bp, Homo sapiens
  source 1..9752: mol_type = genomic DNA
agtctgcttgcaggcggtcgccagcgctccagcggcggctgtcggctttccaattccgccagctcggctgaggctgggctagcctgggtgccagtggctgctagcggcaggcgtcccctgagcaacaggagcccagagaaaaagaagcagccctgagagagcgccggggaaggagaggcccgcgccctctcctggagccagattctgcaggtgcactgggtggggatgatcggcgggctaggttgcaagcctcttatgtgaggagctgaagaggaattaaaatatacaggatgaaaagatggcaatgttgcctcccccaggacctcagagctttgtccatttcacaaaacagtctcttgccctcattgaacaacgcattgctgaaagaaaatcaaaggaacccaaagaagaaaagaaagatgatgatgaagaagccccaaagccaagcagtgacttggaagctggcaaacagctgcccttcatctatggggacattcctcccggcatggtgtcagagcccctggaggacttggacccctactatgcagacaaaaagactttcatagtattgaacaaagggaaaacaatcttccgtttcaatgccacacctgctttatatatgctttctcctttcagtcctctaagaagaatatctattaagattttagtacactccttattcagcatgctcatcatgtgcactattctgacaaactgcatatttatgaccatgaataacccaccggactggaccaaaaatgtcgagtacacttttactggaatatatacttttgaatcacttgtaaaaatccttgcaagaggcttctgtgtaggagaattcacttttcttcgtgacccgtggaactggctggattttgtcgtcattgtttttgcgtatttaacagaatttgtaaacctaggcaatgtttcagctcttcgaactttcagagtattgagagctttgaaaactatttctgtaatcccaggcctgaagacaattgtaggggctttgatccagtcagtgaagaagctttctgatgtcatgatcctgactgtgttctgtctgagtgtgtttgcactaattggactacagctgttcatgggaaacctgaagcataaatgttttcgaaattcacttgaaaataatgaaacattagaaagcataatgaataccctagagagtgaagaagactttagaaaatatttttattacttggaaggatccaaagatgctctcctttgtggtttcagcacagattcaggtcagtgtccagaggggtacacctgtgtgaaaattggcagaaaccctgattatggctacacgagctttgacactttcagctgggccttcttagccttgtttaggctaatgacccaagattactgggaaaacctttaccaacagacgctgcgtgctgctggcaaaacctacatgatcttctttgtcgtagtgattttcctgggctccttttatctaataaacttgatcctggctgtggttgccatggcatatgaagaacagaaccaggcaaacattgaagaagctaaacagaaagaattagaatttcaacagatgttagaccgtcttaaaaaagagcaagaagaagctgaggcaattgcagcggcagcggctgaatatacaagtattaggagaagcagaattatgggcctctcagagagttcttctgaaacatccaaactgagctctaaaagtgctaaagaaagaagaaacagaagaaagaaaaagaatcaaaagaagctctccagtggagaggaaaagggagatgctgagaaattgtcgaaatcagaatcagaggacagcatcagaagaaaaagtttccaccttggtgtcgaagggcataggcgagcacatgaaaagaggttgtctacccccaatcagtcaccactcagcattcgtggctccttgttttctgcaaggcgaagcagcagaacaagtctttttagtttcaaaggcagaggaagagatataggatctgagactgaatttgccgatgatgagcacagcatttttggagacaatgagagcagaaggggctcactgtttgtgccccacagaccccaggagcgacgcagcagtaacatcagccaagccagtaggtccccaccaatgctgccggtgaacgggaaaatgcacagtgctgtggactgcaacggtgtggtctccctggttgatggacgctcagccctcatgctccccaatggacagcttctgccagaggtgataatagataaggcaacttctgatgacagcggcacgaccaatcaaatacacaagaaaaggcgttgtagttcctatctcctttcagaggatatgctgaatgatcccaacctcagacagagagcaatgagtagagcaagcatattaacaaacactgtggaagaacttgaagagtccagacaaaaatgtccaccttggtggtacagatttgcacacaaattcttgatctggaattgctctccatattggataaaattcaaaaagtgtatctattttattgtaatggatccttttgtagatcttgcaattaccatttgcatagttttaaacacattatttatggctatggaacaccacccaatgactgaggaattcaaaaatgtacttgctataggaaatttggtctttactggaatctttgcagctgaaatggtattaaaactgattgccatggatccatatgagtatttccaagtaggctggaatatttttgacagccttattgtgactttaagtttagtggagctctttctagcagatgtggaaggattgtcagttctgcgatcattcagactgctccgagtcttcaagttggcaaaatcctggccaacattgaacatgctgattaagatcattggtaactcagtaggggctctaggtaacctcaccttagtgttggccatcatcgtcttcatttttgctgtggtcggcatgcagctctttggtaagagctacaaagaatgtgtctgcaagatcaatgatgactgtacgctcccacggtggcacatgaacgacttcttccactccttcctgattgtgttccgcgtgctgtgtggagagtggatagagaccatgtgggactgtatggaggtcgctggtcaagctatgtgccttattgtttacatgatggtcatggtcattggaaacctggtggtcctaaacctatttctggccttattattgagctcatttagttcagacaatcttacagcaattgaagaagaccctgatgcaaacaacctccagattgcagtgactagaattaaaaagggaataaattatgtgaaacaaaccttacgtgaatttattctaaaagcattttccaaaaagccaaagatttccagggagataagacaagcagaagatctgaatactaagaaggaaaactatatttctaaccatacacttgctgaaatgagcaaaggtcacaatttcctcaaggaaaaagataaaatcagtggttttggaagcagcgtggacaaacacttgatggaagacagtgatggtcaatcatttattcacaatcccagcctcacagtgacagtgccaattgcacctggggaatccgatttggaaaatatgaatgctgaggaacttagcagtgattcggatagtgaatacagcaaagtgagattaaaccggtcaagctcctcagagtgcagcacagttgataaccctttgcctggagaaggagaagaagcagaggctgaacctatgaattccgatgagccagaggcctgtttcacagatggttgtgtatggaggttctcatgctgccaagttaacatagagtcagggaaaggaaaaatctggtggaacatcaggaaaacctgctacaagattgttgaacacagttggtttgaaagcttcattgtcctcatgatcctgctcagcagtggtgccctggcttttgaagatatttatattgaaaggaaaaagaccattaagattatcctggagtatgcagacaagatcttcacttacatcttcattctggaaatgcttctaaaatggatagcatatggttataaaacatatttcaccaatgcctggtgttggctggatttcctaattgttgatgtttctttggttactttagtggcaaacactcttggctactcagatcttggccccattaaatcccttcggacactgagagctttaagacctctaagagccttatctagatttgaaggaatgagggtcgttgtgaatgcactcataggagcaattccttccatcatgaatgtgctacttgtgtgtcttatattctggctgatattcagcatcatgggagtaaatttgtttgctggcaagttctatgagtgtattaacaccacagatgggtcacggtttcctgcaagtcaagttccaaatcgttccgaatgttttgcccttatgaatgttagtcaaaatgtgcgatggaaaaacctgaaagtgaactttgataatgtcggacttggttacctatctctgcttcaagttgcaacttttaagggatggacgattattatgtatgcagcagtggattctgttaatgtagacaagcagcccaaatatgaatatagcctctacatgtatatttattttgtcgtctttatcatctttgggtcattcttcactttgaacttgttcattggtgtcatcatagataatttcaaccaacagaaaaagaagcttggaggtcaagacatctttatgacagaagaacagaagaaatactataatgcaatgaaaaagctggggtccaagaagccacaaaagccaattcctcgaccagggaacaaaatccaaggatgtatatttgacctagtgacaaatcaagcctttgatattagtatcatggttcttatctgtctcaacatggtaaccatgatggtagaaaaggagggtcaaagtcaacatatgactgaagttttatattggataaatgtggtttttataatccttttcactggagaatgtgtgctaaaactgatctccctcagacactactacttcactgtaggatggaatatttttgattttgtggttgtgattatctccattgtaggtatgtttctagctgatttgattgaaacgtattttgtgtcccctaccctgttccgagtgatccgtcttgccaggattggccgaatcctacgtctagtcaaaggagcaaaggggatccgcacgctgctctttgctttgatgatgtcccttcctgcgttgtttaacatcggcctcctgctcttcctggtcatgttcatctacgccatctttggaatgtccaactttgcctatgttaaaaaggaagatggaattaatgacatgttcaattttgagacctttggcaacagtatgatttgcctgttccaaattacaacctctgctggctgggatggattgctagcacctattcttaacagtaagccacccgactgtgacccaaaaaaagttcatcctggaagttcagttgaaggagactgtggtaacccatctgttggaatattctactttgttagttatatcatcatatccttcctggttgtggtgaacatgtacattgcagtcatactggagaattttagtgttgccactgaagaaagtactgaacctctgagtgaggatgactttgagatgttctatgaggtttgggagaagtttgatcccgatgcgacccagtttatagagttctctaaactctctgattttgcagctgccctggatcctcctcttctcatagcaaaacccaacaaagtccagctcattgccatggatctgcccatggttagtggtgaccggatccattgtcttgacatcttatttgcttttacaaagcgtgttttgggtgagagtggggagatggattctcttcgttcacagatggaagaaaggttcatgtctgcaaatccttccaaagtgtcctatgaacccatcacaaccacactaaaacggaaacaagaggatgtgtctgctactgtcattcagcgtgcttatagacgttaccgcttaaggcaaaatgtcaaaaatatatcaagtatatacataaaagatggagacagagatgatgatttactcaataaaaaagatatggcttttgataatgttaatgagaactcaagtccagaaaaaacagatgccacttcatccaccacctctccaccttcatatgatagtgtaacaaagccagacaaagagaaatatgaacaagacagaacagaaaaggaagacaaagggaaagacagcaaggaaagcaaaaaatagagcttcatttttgatatattgtttacagcctgtgaaagtgatttatttgtgttaataaaactcttttgaggaagtctatgccaaaatcctttttatcaaaatattctcgaaggcagtgcagtcactaactctgatttcctaagaaaggtgggcagcattagcagatggttatttttgcactgatgattctttaagaatcgtaagagaactctgtaggaattattgattatagcatacaaaagtgattcagttttttggtttttaataaatcagaagaccatgtagaaaacttttacatctgccttgtcatcttttcacaggattgtaattagtcttgtttcccatgtaaataaacaacacacgcatacagaaaaatctattatttatctattatttggaaatcaacaaaagtatttgccttggctttgcaatgaaatgcttgatagaagtaatggacattagttatgaatgtttagttaaaatgcattattagggagcttgactttttatcaatgtacagaggttattctatattttgaggtgcttaaatttattctacattgcatcagaaccaatttatatgtgcctataaaatgccatgggattaaaaatatatgtaggctattcatttctacaaatgtttttcattcatcttgactcacatgccaacaaggataagacttacctttagagtattgtgtttcatagcctttcttctttcatatccctttttgttcatagaataaccacagaacttgaaaaattattctaagtacatattacactcctcaaaaaaaacaaagataactgagaaaaaagttattgacagaagttctatttgctattatttacatagcctaacatttgactgtgctgcccaaaatactgataatagtctcttaaactcttttgtcaaattttcctgctttcttatgcagtattgtttagtcatcctttcgctgtaagcaaagttgatgaaatccttcctgatatgcagttagttgtttgaccacggtacatacttgagcagataataacttgggcacagtatttattgcatcacttgtatacaatcccgtgtttggcaagctttcaaatcatgtaatatgacagactttacacagatatgtgtttagtatgaataaaaaagcattgaaatagggattcttgccaacttgctctcttgccaccaacttactttcctaaattatggaagtaatcttttttggatatacttcaatgtatacaatgaggaagatgtcaccttctccttaaaattctatgatgtgaaatatattttgcctcaatcaacacagtaccatgggcttctaatttatcaagcacatattcattttgcattagctgtagacatctagttttttgaaaacacctattaatagtaatttgaaaagaaataaccataatgctttttttcgtgagtttatttcaggaatatgagatctttcttctataaagttattcatgcacaggcaaaaattgagctacacaggtagaatgtagttttacttagaagatttttgtgggaggttttgaagcaaatatataaaacaactttcactaatttgctttccatatttaaaaaataataaattacatttatataataaatgtttaaagcacatattttttgttgttctggcaatttaaaaagaaagaggatttaaacgtacctatagaaacaaagatttatggttaaagaatgagatcagaagtctagaatgtttttaaattgtgatatattttacaacatccgttattactttgagacatttgtcctaatctacgtataaaactcaatctagggctaaagattctttataccatcttaggttcattcatcttaggctatttgaaccactttttaatttaatatgaaagacaccatgcagtgttttccgagactacatagatcattttatcacatacctaccaagcctgttggaaataggttttgataatttaagtagggacctatacaaaatatattacatttatcagatttttaaatacattcaattaagaatttaacatcaccttaaatttgaattcaatctaccgttatttcaaactcacaaatataactgcattatgaatacttacataatgtagtaagacaagatgtttgacaggttcgtgtgtaattttctattaatgtttttacattgccttgtttttatgtaaaataaaaaatatgggcaactggtttgttaacaacacaatttcttcttagcatttcaaaaatatatataaagttgttctttttcctatttcatgaactatgtttttttttaaaataacatggttaagttttatatatatttacgtttgtttcaggaatgtctacttgtgactttttatcaattaaaaataatatttggaagaaagagcttattaagtataagcttgaagtaaaattagacctctctttccatgtagattactgtttgtactgatggtttcacccttcagaaggcactgtcatattaatatttaaattttataatcgctgaacttattacacccaacaatacagaaaggcagttacactgaagaacttaacttagaataaaatggaagcaaacaggttttctaaaaacttttttaagtgaccaggtctcgctctgtcacccaggctagagtgcaatggcatgatcatagctctctgcagcctcaactctgggctcaagcaaccctcctgcctcagcctcccaagtagctaagactacaggtacatgccaccatgcctggctaatatttaaatttttgtagataaggggtcttgctatgttgcccaggctagtctcaaactcctggcttcaagtgttcctactgtcatgacctgccaacatgctggggttacaggcatgagccaccatgccccaaacaggtttgaacacaaatctttcggatgaaaattagagaacctaattttagctttttgatagttacctagtttgcaaaagatttgggtgacttgtgagctgtttttaaatgctgattgttgaacatcacaacccaaaatacttagcatgattttatagagttttgatagctttattaaaaagagtgaaaataaaatgcatatgtaaataaagcagttctaaatagctatttcagagaaatgttaatagaagtgctgaaagaagggccaactaaattaggatggccagggaattggcctgggtttaggacctatgtatgaaggccaccaattttttaaaaatatctgtggtttattatgttattatcttcttgaggaaaacaatcaagaattgcttcatgaaaataaataaatagccatgaatatcataaagctgtttacataggattctttacaaatttcatagatctatgaatgctcaaaatgtttgagtttgccataaattatattgtagttatattgtagttatacttgagactgacacattgtaatataatctaagaataaaagttatacaaaataaaa

SEQ ID NO: 580 - DNA, 8855 bp, Homo sapiens
  source 1..8855: mol_type = genomic DNA
aaaatccttgcaagaggcttctgtgtaggagaattcacttttcttcgtgacccgtggaactggctggattttgtcgtcattgtttttgcgcctgaagacaattgtaggggctttgatccagtcagtgaagaagctttctgatgtcatgatcctgactgtgttctgtctgagtgtgtttgcactaattggactacagctgttcatgggaaacctgaagcataaatgttttcgaaattcacttgaaaataatgaaacattagaaagcataatgaataccctagagagtgaagaagactttagaaaatatttttattacttggaaggatccaaagatgctctcctttgtggtttcagcacagattcaggtcagtgtccagaggggtacacctgtgtgaaaattggcagaaaccctgattatggctacacgagctttgacactttcagctgggccttcttagccttgtttaggctaatgacccaagattactgggaaaacctttaccaacagacgctgcgtgctgctggcaaaacctacatgatcttctttgtcgtagtgattttcctgggctccttttatctaataaacttgatcctggctgtggttgccatggcatatgaagaacagaaccaggcaaacattgaagaagctaaacagaaagaattagaatttcaacagatgttagaccgtcttaaaaaagagcaagaagaagctgaggcaattgcagcggcagcggctgaatatacaagtattaggagaagcagaattatgggcctctcagagagttcttctgaaacatccaaactgagctctaaaagtgctaaagaaagaagaaacagaagaaagaaaaagaatcaaaagaagctctccagtggagaggaaaagggagatgctgagaaattgtcgaaatcagaatcagaggacagcatcagaagaaaaagtttccaccttggtgtcgaagggcataggcgagcacatgaaaagaggttgtctacccccaatcagtcaccactcagcattcgtggctccttgttttctgcaaggcgaagcagcagaacaagtctttttagtttcaaaggcagaggaagagatataggatctgagactgaatttgccgatgatgagcacagcatttttggagacaatgagagcagaaggggctcactgtttgtgccccacagaccccaggagcgacgcagcagtaacatcagccaagccagtaggtccccaccaatgctgccggtgaacgggaaaatgcacagtgctgtggactgcaacggtgtggtctccctggttgatggacgctcagccctcatgctccccaatggacagcttctgccagaggtgataatagataaggcaacttctgatgacagcggcacgaccaatcaaatacacaagaaaaggcgttgtagttcctatctcctttcagaggatatgctgaatgatcccaacctcagacagagagcaatgagtagagcaagcatattaacaaacactgtggaagaacttgaagagtccagacaaaaatgtccaccttggtggtacagatttgcacacaaattcttgatctggaattgctctccatattggataaaattcaaaaagtgtatctattttattgtaatggatccttttgtagatcttgcaattaccatttgcatagttttaaacacattatttatggctatggaacaccacccaatgactgaggaattcaaaaatgtacttgctataggaaatttggtctttactggaatctttgcagctgaaatggtattaaaactgattgccatggatccatatgagtatttccaagtaggctggaatatttttgacagccttattgtgactttaagtttagtggagctctttctagcagatgtggaaggattgtcagttctgcgatcattcagactgctccgagtcttcaagttggcaaaatcctggccaacattgaacatgctgattaagatcattggtaactcagtaggggctctaggtaacctcaccttagtgttggccatcatcgtcttcatttttgctgtggtcggcatgcagctctttggtaagagctacaaagaatgtgtctgcaagatcaatgatgactgtacgctcccacggtggcacatgaacgacttcttccactccttcctgattgtgttccgcgtgctgtgtggagagtggatagagaccatgtgggactgtatggaggtcgctggtcaagctatgtgccttattgtttacatgatggtcatggtcattggaaacctggtggtcctaaacctatttctggccttattattgagctcatttagttcagacaatcttacagcaattgaagaagaccctgatgcaaacaacctccagattgcagtgactagaattaaaaagggaataaattatgtgaaacaaaccttacgtgaatttattctaaaagcattttccaaaaagccaaagatttccagggagataagacaagcagaagatctgaatactaagaaggaaaactatatttctaaccatacacttgctgaaatgagcaaaggtcacaatttcctcaaggaaaaagataaaatcagtggttttggaagcagcgtggacaaacacttgatggaagacagtgatggtcaatcatttattcacaatcccagcctcacagtgacagtgccaattgcacctggggaatccgatttggaaaatatgaatgctgaggaacttagcagtgattcggatagtgaatacagcaaagtgagattaaaccggtcaagctcctcagagtgcagcacagttgataaccctttgcctggagaaggagaagaagcagaggctgaacctatgaattccgatgagccagaggcctgtttcacagatggttgtgtatggaggttctcatgctgccaagttaacatagagtcagggaaaggaaaaatctggtggaacatcaggaaaacctgctacaagattgttgaacacagttggtttgaaagcttcattgtcctcatgatcctgctcagcagtggtgccctggcttttgaagatatttatattgaaaggaaaaagaccattaagattatcctggagtatgcagacaagatcttcacttacatcttcattctggaaatgcttctaaaatggatagcatatggttataaaacatatttcaccaatgcctggtgttggctggatttcctaattgttgatgtttctttggttactttagtggcaaacactcttggctactcagatcttggccccattaaatcccttcggacactgagagctttaagacctctaagagccttatctagatttgaaggaatgagggtcgttgtgaatgcactcataggagcaattccttccatcatgaatgtgctacttgtgtgtcttatattctggctgatattcagcatcatgggagtaaatttgtttgctggcaagttctatgagtgtattaacaccacagatgggtcacggtttcctgcaagtcaagttccaaatcgttccgaatgttttgcccttatgaatgttagtcaaaatgtgcgatggaaaaacctgaaagtgaactttgataatgtcggacttggttacctatctctgcttcaagttgcaacttttaagggatggacgattattatgtatgcagcagtggattctgttaatgtagacaagcagcccaaatatgaatatagcctctacatgtatatttattttgtcgtctttatcatctttgggtcattcttcactttgaacttgttcattggtgtcatcatagataatttcaaccaacagaaaaagaagcttggaggtcaagacatctttatgacagaagaacagaagaaatactataatgcaatgaaaaagctggggtccaagaagccacaaaagccaattcctcgaccagggaacaaaatccaaggatgtatatttgacctagtgacaaatcaagcctttgatattagtatcatggttcttatctgtctcaacatggtaaccatgatggtagaaaaggagggtcaaagtcaacatatgactgaagttttatattggataaatgtggtttttataatccttttcactggagaatgtgtgctaaaactgatctccctcagacactactacttcactgtaggatggaatatttttgattttgtggttgtgattatctccattgtaggtatgtttctagctgatttgattgaaacgtattttgtgtcccctaccctgttccgagtgatccgtcttgccaggattggccgaatcctacgtctagtcaaaggagcaaaggggatccgcacgctgctctttgctttgatgatgtcccttcctgcgttgtttaacatcggcctcctgctcttcctggtcatgttcatctacgccatctttggaatgtccaactttgcctatgttaaaaaggaagatggaattaatgacatgttcaattttgagacctttggcaacagtatgatttgcctgttccaaattacaacctctgctggctgggatggattgctagcacctattcttaacagtaagccacccgactgtgacccaaaaaaagttcatcctggaagttcagttgaaggagactgtggtaacccatctgttggaatattctactttgttagttatatcatcatatccttcctggttgtggtgaacatgtacattgcagtcatactggagaattttagtgttgccactgaagaaagtactgaacctctgagtgaggatgactttgagatgttctatgaggtttgggagaagtttgatcccgatgcgacccagtttatagagttctctaaactctctgattttgcagctgccctggatcctcctcttctcatagcaaaacccaacaaagtccagctcattgccatggatctgcccatggttagtggtgaccggatccattgtcttgacatcttatttgcttttacaaagcgtgttttgggtgagagtggggagatggattctcttcgttcacagatggaagaaaggttcatgtctgcaaatccttccaaagtgtcctatgaacccatcacaaccacactaaaacggaaacaagaggatgtgtctgctactgtcattcagcgtgcttatagacgttaccgcttaaggcaaaatgtcaaaaatatatcaagtatatacataaaagatggagacagagatgatgatttactcaataaaaaagatatggcttttgataatgttaatgagaactcaagtccagaaaaaacagatgccacttcatccaccacctctccaccttcatatgatagtgtaacaaagccagacaaagagaaatatgaacaagacagaacagaaaaggaagacaaagggaaagacagcaaggaaagcaaaaaatagagcttcatttttgatatattgtttacagcctgtgaaagtgatttatttgtgttaataaaactcttttgaggaagtctatgccaaaatcctttttatcaaaatattctcgaaggcagtgcagtcactaactctgatttcctaagaaaggtgggcagcattagcagatggttatttttgcactgatgattctttaagaatcgtaagagaactctgtaggaattattgattatagcatacaaaagtgattcagttttttggtttttaataaatcagaagaccatgtagaaaacttttacatctgccttgtcatcttttcacaggattgtaattagtcttgtttcccatgtaaataaacaacacacgcatacagaaaaatctattatttatctattatttggaaatcaacaaaagtatttgccttggctttgcaatgaaatgcttgatagaagtaatggacattagttatgaatgtttagttaaaatgcattattagggagcttgactttttatcaatgtacagaggttattctatattttgaggtgcttaaatttattctacattgcatcagaaccaatttatatgtgcctataaaatgccatgggattaaaaatatatgtaggctattcatttctacaaatgtttttcattcatcttgactcacatgccaacaaggataagacttacctttagagtattgtgtttcatagcctttcttctttcatatccctttttgttcatagaataaccacagaacttgaaaaattattctaagtacatattacactcctcaaaaaaaacaaagataactgagaaaaaagttattgacagaagttctatttgctattatttacatagcctaacatttgactgtgctgcccaaaatactgataatagtctcttaaactcttttgtcaaattttcctgctttcttatgcagtattgtttagtcatcctttcgctgtaagcaaagttgatgaaatccttcctgatatgcagttagttgtttgaccacggtacatacttgagcagataataacttgggcacagtatttattgcatcacttgtatacaatcccgtgtttggcaagctttcaaatcatgtaatatgacagactttacacagatatgtgtttagtatgaataaaaaagcattgaaatagggattcttgccaacttgctctcttgccaccaacttactttcctaaattatggaagtaatcttttttggatatacttcaatgtatacaatgaggaagatgtcaccttctccttaaaattctatgatgtgaaatatattttgcctcaatcaacacagtaccatgggcttctaatttatcaagcacatattcattttgcattagctgtagacatctagttttttgaaaacacctattaatagtaatttgaaaagaaataaccataatgctttttttcgtgagtttatttcaggaatatgagatctttcttctataaagttattcatgcacaggcaaaaattgagctacacaggtagaatgtagttttacttagaagatttttgtgggaggttttgaagcaaatatataaaacaactttcactaatttgctttccatatttaaaaaataataaattacatttatataataaatgtttaaagcacatattttttgttgttctggcaatttaaaaagaaagaggatttaaacgtacctatagaaacaaagatttatggttaaagaatgagatcagaagtctagaatgtttttaaattgtgatatattttacaacatccgttattactttgagacatttgtcctaatctacgtataaaactcaatctagggctaaagattctttataccatcttaggttcattcatcttaggctatttgaaccactttttaatttaatatgaaagacaccatgcagtgttttccgagactacatagatcattttatcacatacctaccaagcctgttggaaataggttttgataatttaagtagggacctatacaaaatatattacatttatcagatttttaaatacattcaattaagaatttaacatcaccttaaatttgaattcaatctaccgttatttcaaactcacaaatataactgcattatgaatacttacataatgtagtaagacaagatgtttgacaggttcgtgtgtaattttctattaatgtttttacattgccttgtttttatgtaaaataaaaaatatgggcaactggtttgttaacaacacaatttcttcttagcatttcaaaaatatatataaagttgttctttttcctatttcatgaactatgtttttttttaaaataacatggttaagttttatatatatttacgtttgtttcaggaatgtctacttgtgactttttatcaattaaaaataatatttggaagaaagagcttattaagtataagcttgaagtaaaattagacctctctttccatgtagattactgtttgtactgatggtttcacccttcagaaggcactgtcatattaatatttaaattttataatcgctgaacttattacacccaacaatacagaaaggcagttacactgaagaacttaacttagaataaaatggaagcaaacaggttttctaaaaacttttttaagtgaccaggtctcgctctgtcacccaggctagagtgcaatggcatgatcatagctctctgcagcctcaactctgggctcaagcaaccctcctgcctcagcctcccaagtagctaagactacaggtacatgccaccatgcctggctaatatttaaatttttgtagataaggggtcttgctatgttgcccaggctagtctcaaactcctggcttcaagtgttcctactgtcatgacctgccaacatgctggggttacaggcatgagccaccatgccccaaacaggtttgaacacaaatctttcggatgaaaattagagaacctaattttagctttttgatagttacctagtttgcaaaagatttgggtgacttgtgagctgtttttaaatgctgattgttgaacatcacaacccaaaatacttagcatgattttatagagttttgatagctttattaaaaagagtgaaaataaaatgcatatgtaaataaagcagttctaaatagctatttcagagaaatgttaatagaagtgctgaaagaagggccaactaaattaggatggccagggaattggcctgggtttaggacctatgtatgaaggccaccaattttttaaaaatatctgtggtttattatgttattatcttcttgaggaaaacaatcaagaattgcttcatgaaaataaataaatagccatgaatatcataaagctgtttacataggattctttacaaatttcatagatctatgaatgctcaaaatgtttgagtttgccataaattatattgtagttatattgtagttatacttgagactgacacattgtaatataatctaagaataaaagttatacaaaataaaa

SEQ ID NO: 581 - DNA, 1783 bp, Homo sapiens
  source 1..1783: mol_type = genomic DNA
acgtgatccgacaaacggcctctgcatagtgcagaacattctgctgctcttaaaggtacaggcctcagggtccctgctgtagacggggcgggggagagtacgatgggtggggcgtggtgggtcgtagggcgctcgagatggagcccccagcttccttgatggatcgcggggcgcgagtgccctagacaagccggagctgggaccggcaatcgggcgttgatccttgtcacctgtcgcagaccctcatccctcccgtgggagccccctttggacactctatgaccctggaccctcgggggacctgaacttgatgcgatgggaggctgtgcaggctcgcggcggcgcttttcggattccgagggctgctgggcctttgcaacaacttctcttatgtggtgatgctgagtgccgcccacgacatccttagccacaagaggacatcgggaaaccagagccatgctgtgctcctggcggacatcctccccacactcgtcatcaaattgttggctcctcttggccttcacctgctgccctacagcccccgggttctcgtcagtgggatttgtgctgctggaagcttcgtcctggttgccttttctcattctgtggggaccagcctgtgtggtgtggtcttcgctagcatctcatcaggccttggggaggtcaccttcctctccctcactgccttctaccccagggccgtgatctcctggtggtcctcagggactgggggagctgggctgctgggggccctgtcctacctgggcctcacccaggccggcctctcccctcagcagaccctgctgtccatgctgggtatccctgccctgctgctggccagctatttcttgttgctcacatctcctgaggcccaggaccctggaggggaagaagaagcagagagcgcagcccggcagcccctcataagaaccgaggccccggagtcgaagccaggctccagctccagcctctcccttcgggaaaggtggacagtgttcaagggtctgctgtggtacattgttcccttggtcgtagtttactttgccgagtatttcattaaccagggactttttgaactcctctttttctggaacacttccctgagtcacgctcagcaataccgctggtaccagatgctgtaccaggctggcgtctttgcctcccgctcttctctccgctgctgtcgcatccgtttcacctgggccctggccctgctgcagtgcctcaacctggtgttcctgctggcagacgtgtggttcggctttctgccaagcatctacctcgtcttcctgatcattctgtatgaggggctcctgggaggcgcagcctacgtgaacaccttccacaacatcgccctggagaccagtgatgagcaccgggagtttgcaatggcggccacctgcatctctgacacactggggatctccctgtcggggctcctggctttgcctctgcatgacttcctctgccagctctcctgatactcgggatcctcaggacgcaggtcacattcacctgtgggcagagggacaggttatcaatagtctggctgtctatcgtcatcgtgagactgactttggtgtaggagttcgagaccaccctggccaacatggcaaaaccccatctccacaaaaattggataatttgataattatcattattgggtttctgagacgttacacatttaacgttctcttctgcacaagttgcctttgtgtgagtatactaactttctgtagaggtatacttgtaatcacaaataagaataaattatataaaacaa

SEQ ID NO: 582 - DNA, 3541 bp, Homo sapiens
  source 1..3541: mol_type = genomic DNA
acgtgatccgacaaacggcctctgcatagtgcagaacattctgctgctcttaaagaccctcatccctcccgtgggagccccctttggacactctatgaccctggaccctcgggggacctgaacttgatgcgatgggaggctgtgcaggctcgcggcggcgcttttcggattccgagggggaggagaccgtcccggagccccggctccctctgttggaccatcagggcgcgcattggaagaacgcggtgggcttctggctgctgggcctttgcaacaacttctcttatgtggtgatgctgagtgccgcccacgacatccttagccacaagaggacatcgggaaaccagagccatgctgtgctcctggcggacatcctccccacactcgtcatcaaattgttggctcctcttggccttcacctgctgccctacagcccccgggttctcgtcagtgggatttgtgctgctggaagcttcgtcctggttgccttttctcattctgtggggaccagcctgtgtggtgtggtcttcgctagcatctcatcaggccttggggaggtcaccttcctctccctcactgccttctaccccagggccgtgatctcctggtggtcctcagggactgggggagctgggctgctgggggccctgtcctacctgggcctcacccaggccggcctctcccctcagcagaccctgctgtccatgctgggtatccctgccctgctgctggccagctatttcttgttgctcacatctcctgaggcccaggaccctggaggggaagaagaagcagagagcgcagcccggcagcccctcataagaaccgaggccccggagtcgaagccaggctccagctccagcctctcccttcgggaaaggtggacagtgttcaagggtctgctgtggtacattgttcccttggtcgtagtttactttgccgagtatttcattaaccagggactttttgaactcctctttttctggaacacttccctgagtcacgctcagcaataccgctggtaccagatgctgtaccaggctggcgtctttgcctcccgctcttctctccgctgctgtcgcatccgtttcacctgggccctggccctgctgcagtgcctcaacctggtgttcctgctggcagacgtgtggttcggctttctgccaagcatctacctcgtcttcctgatcattctgtatgaggggctcctgggaggcgcagcctacgtgaacaccttccacaacatcgccctggagaccagtgatgagcaccgggagtttgcaatggcggccacctgcatctctgacacactggggatctccctgtcggggctcctggctttgcctctgcatgacttcctctgccagctctcctgatactcgggatcctcaggacgcaggtcacattcacctgtgggcagagggacaggtcagacacccaggcccaccccagagaccctccatgaactgtgctcccagccttcccggcaggtctgggagtagggaagggctgaagccttgtttcccttgcaggggggccagccattgtctcccacttggggagtttcttcctggcatcatgccttctgaataaatgccgattttatccatggacttcttatatcgtttttgtctctaaaaagaaacttttattatgaaagtaatacatgcccactttcctatatatagacagcataaagaaggtatgtcagcagatttctcccttttttgtttgtttgtttgtttgtttgtttgttttgacagagtctcactctgtcacctaggctggagtgcaatggcgtgatcttggctcactgcaacctccacttcccggttcaagcaattctcctgcctcagcctcccgagtagctgggattacaggtggtcactaccatgtctggctaatttttatatttttagtacagacgacattttgccatgttggccaggctggtctcaaactcatgacctcaggtgatccgcccaccttggcctcccaaagtgctgagattacaggtgtgagccactgtacctggcctctgccatctttgaggccttacgtattcattcattcatgcattcattgtttgggacaatctgtaaacaatcatgttggacattctttccagcatgaaagttttcagagaagtggaaagaattgtgcagtgaatcatcctgagtatgcgccaccctgttctatgttaacattttgttacagttgttttatcatgtagtccagcccccatcaaatctatgtattcactgttccatcagtgagtagatagagctaatgaatggcagggttggcacctgaggcattttattttattatttttttttatttttagagacagggttgcactctgtcacccaggctgaagtacagtggcacagtcatggctcactgtagccttgacctcctagactcaaacaatcctcacaccttggcctcccaagcagctgggactgcaagtgcatgccaccaagcccagctaatttttttttttttttttgtagagacgcgatcttcctatgttacccaggctggtcttgaactcttgagctcaagcagtcctgccttggcctcccaaagtactgagattacaagcatgagccactgctcctggcatcctgttatttaggtacagtttttatacacagtaaaatgtataaattgttacatatttttacagtaaactgagtctgggccaggcactgtggctcacacctgtaatcccagcactttgggaggctgaggcgggcagatcacctgaggtcaggagtttgagaccagcctgcacaacgtgacaaaaccccgtctctacgaaaaatataaaaaattagccaggtgtggtggcttgcacctgtagtcccagctacttggaaggctgaggcgcaagaattgcttgaacccaggaggcggaggttgtggtgagctgaaattgcaccactgcactccagcctgggcaacagagcaagactctgtctcaaaaaaaaaaacaaaaaaactgagtctgacttagtgtttctcatacttcattgttaccctttctactatatttgccatatctgaacctaacagtacttttatttacttaatatttttcattaaagcaactaacctttaatatacattcagttattttaaagggaaacattattaaaatcatgagtttgaggtgatatatatgtattttctactttactttaaatagttatgtaactattggagtttaaaatgaacatgcaagttccccctgagactactccattacgaccagtgatgtttgtggacccagatctaggaaatgctgacccactggttaatagcatgggctttgggggcagaaggaactgactttcaggtgccaaccctgccattcactagctctattaccttgggcaagtcacttcacctctctgcacctcagtttcctgatctgtccaatgggataatagtagcaccagcatttcataagttgcttttggaaactacatgagatcatgtcaacactcaataaacatcagctctgatcatgcta

SEQ ID NO: 583 - DNA, 3638 bp, Homo sapiens
  source 1..3638: mol_type = genomic DNA
acgtgatccgacaaacggcctctgcatagtgcagaacattctgctgctcttaaaggtacaggcctcagggtccctgctgtagacggggcgggggagagtacgatgggtggggcgtggtgggtcgtagggcgctcgagatggagcccccagcttccttgatggatcgcggggcgcgagtgccctagacaagccggagctgggaccggcaatcgggcgttgatccttgtcacctgtcgcagaccctcatccctcccgtgggagccccctttggacactctatgaccctggaccctcgggggacctgaacttgatgcgatgggaggctgtgcaggctcgcggcggcgcttttcggattccgagggctgctgggcctttgcaacaacttctcttatgtggtgatgctgagtgccgcccacgacatccttagccacaagaggacatcgggaaaccagagccatgtggacccaggcccaacgccgatcccccacaacagctcatcacgatttgactgcaactctgtctctacggctcccccgggttctcgtcagtgggatttgtgctgctggaagcttcgtcctggttgccttttctcattctgtggggaccagcctgtgtggtgtggtcttcgctagcatctcatcaggccttggggaggtcaccttcctctccctcactgccttctaccccagggccgtgatctcctggtggtcctcagggactgggggagctgggctgctgggggccctgtcctacctgggcctcacccaggccggcctctcccctcagcagaccctgctgtccatgctgggtatccctgccctgctgctggccagctatttcttgttgctcacatctcctgaggcccaggaccctggaggggaagaagaagcagagagcgcagcccggcagcccctcataagaaccgaggccccggagtcgaagccaggctccagctccagcctctcccttcgggaaaggtggacagtgttcaagggtctgctgtggtacattgttcccttggtcgtagtttactttgccgagtatttcattaaccagggactttttgaactcctctttttctggaacacttccctgagtcacgctcagcaataccgctggtaccagatgctgtaccaggctggcgtctttgcctcccgctcttctctccgctgctgtcgcatccgtttcacctgggccctggccctgctgcagtgcctcaacctggtgttcctgctggcagacgtgtggttcggctttctgccaagcatctacctcgtcttcctgatcattctgtatgaggggctcctgggaggcgcagcctacgtgaacaccttccacaacatcgccctggagaccagtgatgagcaccgggagtttgcaatggcggccacctgcatctctgacacactggggatctccctgtcggggctcctggctttgcctctgcatgacttcctctgccagctctcctgatactcgggatcctcaggacgcaggtcacattcacctgtgggcagagggacaggtcagacacccaggcccaccccagagaccctccatgaactgtgctcccagccttcccggcaggtctgggagtagggaagggctgaagccttgtttcccttgcaggggggccagccattgtctcccacttggggagtttcttcctggcatcatgccttctgaataaatgccgattttatccatggacttcttatatcgtttttgtctctaaaaagaaacttttattatgaaagtaatacatgcccactttcctatatatagacagcataaagaaggtatgtcagcagatttctcccttttttgtttgtttgtttgtttgtttgtttgttttgacagagtctcactctgtcacctaggctggagtgcaatggcgtgatcttggctcactgcaacctccacttcccggttcaagcaattctcctgcctcagcctcccgagtagctgggattacaggtggtcactaccatgtctggctaatttttatatttttagtacagacgacattttgccatgttggccaggctggtctcaaactcatgacctcaggtgatccgcccaccttggcctcccaaagtgctgagattacaggtgtgagccactgtacctggcctctgccatctttgaggccttacgtattcattcattcatgcattcattgtttgggacaatctgtaaacaatcatgttggacattctttccagcatgaaagttttcagagaagtggaaagaattgtgcagtgaatcatcctgagtatgcgccaccctgttctatgttaacattttgttacagttgttttatcatgtagtccagcccccatcaaatctatgtattcactgttccatcagtgagtagatagagctaatgaatggcagggttggcacctgaggcattttattttattatttttttttatttttagagacagggttgcactctgtcacccaggctgaagtacagtggcacagtcatggctcactgtagccttgacctcctagactcaaacaatcctcacaccttggcctcccaagcagctgggactgcaagtgcatgccaccaagcccagctaatttttttttttttttttgtagagacgcgatcttcctatgttacccaggctggtcttgaactcttgagctcaagcagtcctgccttggcctcccaaagtactgagattacaagcatgagccactgctcctggcatcctgttatttaggtacagtttttatacacagtaaaatgtataaattgttacatatttttacagtaaactgagtctgggccaggcactgtggctcacacctgtaatcccagcactttgggaggctgaggcgggcagatcacctgaggtcaggagtttgagaccagcctgcacaacgtgacaaaaccccgtctctacgaaaaatataaaaaattagccaggtgtggtggcttgcacctgtagtcccagctacttggaaggctgaggcgcaagaattgcttgaacccaggaggcggaggttgtggtgagctgaaattgcaccactgcactccagcctgggcaacagagcaagactctgtctcaaaaaaaaaaacaaaaaaactgagtctgacttagtgtttctcatacttcattgttaccctttctactatatttgccatatctgaacctaacagtacttttatttacttaatatttttcattaaagcaactaacctttaatatacattcagttattttaaagggaaacattattaaaatcatgagtttgaggtgatatatatgtattttctactttactttaaatagttatgtaactattggagtttaaaatgaacatgcaagttccccctgagactactccattacgaccagtgatgtttgtggacccagatctaggaaatgctgacccactggttaatagcatgggctttgggggcagaaggaactgactttcaggtgccaaccctgccattcactagctctattaccttgggcaagtcacttcacctctctgcacctcagtttcctgatctgtccaatgggataatagtagcaccagcatttcataagttgcttttggaaactacatgagatcatgtcaacactcaataaacatcagctctgatcatgcta

SEQ ID NO: 584 - DNA, 3718 bp, Homo sapiens
  source 1..3718: mol_type = genomic DNA
acgtgatccgacaaacggcctctgcatagtgcagaacattctgctgctcttaaaggtacaggcctcagggtccctgctgtagacggggcgggggagagtacgatgggtggggcgtggtgggtcgtagggcgctcgagatggagcccccagcttccttgatggatcgcggggcgcgagtgccctagacaagccggagctgggaccggcaatcgggcgttgatccttgtcacctgtcgcagaccctcatccctcccgtgggagccccctttggacactctatgaccctggaccctcgggggacctgaacttgatgcgatgggaggctgtgcaggctcgcggcggcgcttttcggattccgagggctgctgggcctttgcaacaacttctcttatgtggtgatgctgagtgccgcccacgacatccttagccacaagaggacatcgggaaaccagagccatgtggacccaggcccaacgccgatcccccacaacagctcatcacgatttgactgcaactctgtctctacggctgctgtgctcctggcggacatcctccccacactcgtcatcaaattgttggctcctcttggccttcacctgctgccctacagcccccgggttctcgtcagtgggatttgtgctgctggaagcttcgtcctggttgccttttctcattctgtggggaccagcctgtgtggtgtggtcttcgctagcatctcatcaggccttggggaggtcaccttcctctccctcactgccttctaccccagggccgtgatctcctggtggtcctcagggactgggggagctgggctgctgggggccctgtcctacctgggcctcacccaggccggcctctcccctcagcagaccctgctgtccatgctgggtatccctgccctgctgctggccagctatttcttgttgctcacatctcctgaggcccaggaccctggaggggaagaagaagcagagagcgcagcccggcagcccctcataagaaccgaggccccggagtcgaagccaggctccagctccagcctctcccttcgggaaaggtggacagtgttcaagggtctgctgtggtacattgttcccttggtcgtagtttactttgccgagtatttcattaaccagggactttttgaactcctctttttctggaacacttccctgagtcacgctcagcaataccgctggtaccagatgctgtaccaggctggcgtctttgcctcccgctcttctctccgctgctgtcgcatccgtttcacctgggccctggccctgctgcagtgcctcaacctggtgttcctgctggcagacgtgtggttcggctttctgccaagcatctacctcgtcttcctgatcattctgtatgaggggctcctgggaggcgcagcctacgtgaacaccttccacaacatcgccctggagaccagtgatgagcaccgggagtttgcaatggcggccacctgcatctctgacacactggggatctccctgtcggggctcctggctttgcctctgcatgacttcctctgccagctctcctgatactcgggatcctcaggacgcaggtcacattcacctgtgggcagagggacaggtcagacacccaggcccaccccagagaccctccatgaactgtgctcccagccttcccggcaggtctgggagtagggaagggctgaagccttgtttcccttgcaggggggccagccattgtctcccacttggggagtttcttcctggcatcatgccttctgaataaatgccgattttatccatggacttcttatatcgtttttgtctctaaaaagaaacttttattatgaaagtaatacatgcccactttcctatatatagacagcataaagaaggtatgtcagcagatttctcccttttttgtttgtttgtttgtttgtttgtttgttttgacagagtctcactctgtcacctaggctggagtgcaatggcgtgatcttggctcactgcaacctccacttcccggttcaagcaattctcctgcctcagcctcccgagtagctgggattacaggtggtcactaccatgtctggctaatttttatatttttagtacagacgacattttgccatgttggccaggctggtctcaaactcatgacctcaggtgatccgcccaccttggcctcccaaagtgctgagattacaggtgtgagccactgtacctggcctctgccatctttgaggccttacgtattcattcattcatgcattcattgtttgggacaatctgtaaacaatcatgttggacattctttccagcatgaaagttttcagagaagtggaaagaattgtgcagtgaatcatcctgagtatgcgccaccctgttctatgttaacattttgttacagttgttttatcatgtagtccagcccccatcaaatctatgtattcactgttccatcagtgagtagatagagctaatgaatggcagggttggcacctgaggcattttattttattatttttttttatttttagagacagggttgcactctgtcacccaggctgaagtacagtggcacagtcatggctcactgtagccttgacctcctagactcaaacaatcctcacaccttggcctcccaagcagctgggactgcaagtgcatgccaccaagcccagctaatttttttttttttttttgtagagacgcgatcttcctatgttacccaggctggtcttgaactcttgagctcaagcagtcctgccttggcctcccaaagtactgagattacaagcatgagccactgctcctggcatcctgttatttaggtacagtttttatacacagtaaaatgtataaattgttacatatttttacagtaaactgagtctgggccaggcactgtggctcacacctgtaatcccagcactttgggaggctgaggcgggcagatcacctgaggtcaggagtttgagaccagcctgcacaacgtgacaaaaccccgtctctacgaaaaatataaaaaattagccaggtgtggtggcttgcacctgtagtcccagctacttggaaggctgaggcgcaagaattgcttgaacccaggaggcggaggttgtggtgagctgaaattgcaccactgcactccagcctgggcaacagagcaagactctgtctcaaaaaaaaaaacaaaaaaactgagtctgacttagtgtttctcatacttcattgttaccctttctactatatttgccatatctgaacctaacagtacttttatttacttaatatttttcattaaagcaactaacctttaatatacattcagttattttaaagggaaacattattaaaatcatgagtttgaggtgatatatatgtattttctactttactttaaatagttatgtaactattggagtttaaaatgaacatgcaagttccccctgagactactccattacgaccagtgatgtttgtggacccagatctaggaaatgctgacccactggttaatagcatgggctttgggggcagaaggaactgactttcaggtgccaaccctgccattcactagctctattaccttgggcaagtcacttcacctctctgcacctcagtttcctgatctgtccaatgggataatagtagcaccagcatttcataagttgcttttggaaactacatgagatcatgtcaacactcaataaacatcagctctgatcatgcta

SEQ ID NO: 585 - DNA, 1879 bp, Homo sapiens
  source 1..1879: mol_type = genomic DNA
gtgctgtcacgtgatccgacaaacggcctctgcatagtgcagaacattctgctgctcttaaaggtacaggcctcagggtccctgctgtagacggggcgggggagagtacgatgggtggggcgtggtgggtcgtagggcgctcgagatggagcccccagcttccttgatggatcgcggggcgcgagtgccctagacaagccggagctgggaccggcaatcgggcgttgatccttgtcacctgtcgcagaccctcatccctcccgtgggagccccctttggacactctatgaccctggaccctcgggggacctgaacttgatgcgatgggaggctgtgcaggctcgcggcggcgcttttcggattccgagggggaggagaccgtcccggagccccggctccctctgttggaccatcagggcgcgcattggaagaacgcggtgggcttctggctgctgggcctttgcaacaacttctcttatgtggtgatgctgagtgccgcccacgacatccttagccacaagaggacatcgggaaaccagagccatgtggacccaggcccaacgccgatcccccacaacagctcatcacgatttgactgcaactctgtctctacggctgctgtgctcctggcggacatcctccccacactcgtcatcaaattgttggctcctcttggccttcacctgctgccctacagcccccgggttctcgtcagtgggatttgtgctgctggaagcttcgtcctggttgccttttctcattctgtggggaccagcctgtgtggtgtggtcttcgctagcatctcatcaggccttggggaggtcaccttcctctccctcactgccttctaccccagggccgtgatctcctggtggtcctcagggactgggggagctgggctgctgggggccctgtcctacctgggcctcacccaggccggcctctcccctcagcagaccctgctgtccatgctgggtatccctgccctgctgctggccagctatttcttgttgctcacatctcctgaggcccaggaccctggaggggaagaagaagcagagagcgcagcccggcagcccctcataagaaccgaggccccggagtcgaagccaggctccagctccagcctctcccttcgggaaaggtggacagtgttcaagggtctgctgtggtacattgttcccttggtcgtagtttactttgccgagtatttcattaaccagggactttttgaactcctctttttctggaacacttccctgagtcacgctcagcaataccgctggtaccagatgctgtaccaggctggcgtctttgcctcccgctcttctctccgctgctgtcgcatccgtttcacctgggccctggccctgctgcagtgcctcaacctggtgttcctgctggcagacgtgtggttcggctttctgccaagcatctacctcgtcttcctgatcattctgtatgaggggctcctgggaggcgcagcctacgtgaacaccttccacaacatcgccctggagaccagtgatgagcaccgggagtttgcaatggcggccacctgcatctctgacacactggggatctccctgtcggggctcctggctttgcctctgcatgacttcctctgccagctctcctgatactcgggatcctcaggacgcaggtcacattcacctgtgggcagagggacaggtcagacacccaggcccaccccagagaccctccatgaactgtgctcccagccttcccggcaggtctgggagtagggaagggctgaagccttgtttcccttgcaggggggccagccattgtctcccacttggggagtttcttcctggcatcatgccttctgaataaatgccgattttatccatggaaa

SEQ ID NO: 586 - DNA, 1685 bp, Homo sapiens
  source 1..1685: mol_type = genomic DNA
acgtgatccgacaaacggcctctgcatagtgcagaacattctgctgctcttaaagaccctcatccctcccgtgggagccccctttggacactctatgaccctggaccctcgggggacctgaacttgatgcgatgggaggctgtgcaggctcgcggcggcgcttttcggattccgagggggaggagaccgtcccggagccccggctccctctgttggaccatcagggcgcgcattggaagaacgcggtgggcttctggctgctgggcctttgcaacaacttctcttatgtggtgatgctgagtgccgcccacgacatccttagccacaagaggacatcgggaaaccagagccatgtggacccaggcccaacgccgatcccccacaacagctcatcacgatttgactgcaactctgtctctacggctgctgtgctcctggcggacatcctccccacactcgtcatcaaattgttggctcctcttggccttcacctgctgccctacagcccccgggttctcgtcagtgggatttgtgctgctggaagcttcgtcctggttgccttttctcattctgtggggaccagcctgtgtggtgtggtcttcgctagcatctcatcaggccttggggaggtcaccttcctctccctcactgccttctaccccagggccgtgatctcctggtggtcctcagggactgggggagctgggctgctgggggccctgtcctacctgggcctcacccaggccggcctctcccctcagcagaccctgctgtccatgctgggtatccctgccctgctgctggccagctatttcttgttgctcacatctcctgaggcccaggaccctggaggggaagaagaagcagagagcgcagcccggcagcccctcataagaaccgaggccccggagtcgaagccaggctccagctccagcctctcccttcgggaaaggtggacagtgttcaagggtctgctgtggtacattgttcccttggtcgtagtttactttgccgagtatttcattaaccagggactttttgaactcctctttttctggaacacttccctgagtcacgctcagcaataccgctggtaccagatgctgtaccaggctggcgtctttgcctcccgctcttctctccgctgctgtcgcatccgtttcacctgggccctggccctgctgcagtgcctcaacctggtgttcctgctggcagacgtgtggttcggctttctgccaagcatctacctcgtcttcctgatcattctgtatgaggggctcctgggaggcgcagcctacgtgaacaccttccacaacatcgccctggagaccagtgatgagcaccgggagtttgcaatggcggccacctgcatctctgacacactggggatctccctgtcggggctcctggctttgcctctgcatgacttcctctgccagctctcctgatactcgggatcctcaggacgcaggtcacattcacctgtgggcagagggacaggtcagacacccaggcccaccccagagaccctccatgaactgtgctcccagccttcccggcaggtctgggagtagggaagggctgaagccttgtttcccttgcaggggggccagccattgtctcccacttggggagtttcttcctggcatcatgccttctgaataaatgccgattttatccatgga

SEQ ID NO: 587 - DNA, 5699 bp, Homo sapiens
  source 1..5699: mol_type = genomic DNA
agttaatctggctgtcagttggtgttaacgctgcagtttaagtgttcggattccaagggaaacagacaaacctcacgaaaggaaggaagcaagcaagcaaggaaggaactgcaggaggaaaagaacaggcagaacagcgagaagaataaagggaaagggggggaaacaccaaatctatgattggacctgggcttctttttcgccaatgcaaaaaggaatatgcagcacatttttgccttcttctgcaccggtttcctaggcgcggtagtaggtgccaatttccccaacaatatccagatcgggggattatttccaaaccagcagtcacaggaacatgctgcttttagatttgctttgtcgcaactcacagagcccccgaagctgctcccccagattgatattgtgaacatcagcgacagctttgagatgacctatagattctgttcccagttctccaaaggagtctatgccatctttgggttttatgaacgtaggactgtcaacatgctgacctccttttgtggggccctccacgtctgcttcattacgccgagctttcccgttgatacatccaatcagtttgtccttcagctgcgccctgaactgcaggatgccctcatcagcatcattgaccattacaagtggcagaaatttgtctacatttatgatgccgaccggggcttatccgtcctgcagaaagtcctggatacagctgctgagaagaactggcaggtgacagcagtcaacattttgacaaccacagaggagggataccggatgctctttcaggacctggagaagaaaaaggagcggctggtggtggtggactgtgaatcagaacgcctcaatgctatcttgggccagattataaagctagagaagaatggcatcggctaccactacattcttgcaaatctgggcttcatggacattgacttaaacaaattcaaggagagtggcgccaatgtgacaggtttccagctggtgaactacacagacactattccggccaagatcatgcagcagtggaagaatagtgatgctcgagaccacacacgggtggactggaagagacccaagtacacctctgcgctcacctacgatggggtgaaggtgatggctgaggctttccagagcctgcggaggcagagaattgatatatctcgccgggggaatgctggggattgtctggctaacccagctgttccctggggccaagggatcgacatccagagagctctgcagcaggtgcgatttgaaggtttaacaggaaacgtgcagtttaatgagaaaggacgccggaccaactacacgctccacgtgattgaaatgaaacatgacggcatccgaaagattggttactggaatgaagatgataagtttgtccctgcagccaccgatgcccaagctgggggcgataattcaagtgttcagaacagaacatacatcgtcacaacaatcctagaagatccttatgtgatgctcaagaagaacgccaatcagtttgagggcaatgaccgttacgagggctactgtgtagagctggcggcagagattgccaagcacgtgggctactcctaccgtctggagattgtcagtgatggaaaatacggagcccgagaccctgacacgaaggcctggaatggcatggtgggagagctggtctatggaagagcagatgtggctgtggctcccttaactatcactttggtccgggaagaagttatagatttctccaaaccatttatgagtttggggatctccatcatgattaaaaaaccacagaaatccaagccgggtgtcttctccttccttgatcctttggcttatgagatttggatgtgcattgtttttgcctacattggagtgagtgttgtcctcttcctggtcagccgcttcagtccctatgaatggcacagtgaagagtttgaggaaggacgggaccagacaaccagtgaccagtccaatgagtttgggatattcaacagtttgtggttctccctgggagccttcatgcagcaaggatgtgacatttctcccaggtccctgtctggtcgcatcgttggtggcgtctggtggttcttcaccttaatcatcatctcctcatatacagccaatctggccgccttcctgaccgtggagaggatggtgtctcccattgagagtgcagaggacctagcgaagcagacagaaattgcctacgggacgctggaagcaggatctactaaggagttcttcaggaggtctaaaattgctgtgtttgagaagatgtggacatacatgaagtcagcagagccatcagtttttgtgcggaccacagaggaggggatgattcgagtgaggaaatccaaaggcaaatatgcctacctcctggagtccaccatgaatgagtacattgagcagcggaaaccctgtgacaccatgaaggtgggaggtaacttggattccaaaggctatggcattgcaacacccaaggggtctgccctgagaaatccagtaaacctggcagtgttaaaactgaacgagcaggggcttttggacaaattgaaaaacaaatggtggtacgacaagggcgagtgcggcagcgggggaggtgattccaagaggtcccgtaaacctagcggttttgaaactcagtgagcaaggcgtcttagacaagctgaaaagcaaatggtggtacgataaaggggaatgtggaagcaaggactccggaagtaaggacaagacaagcgctctgagcctcagcaatgtggcaggcgtgttctacatcctgatcggaggacttggactagccatgctggttgccttaatcgagttctgctacaaatcccgtagtgaatccaagcggatgaagggtttttgtttgatcccacagcaatccatcaacgaagccatacggacatcgaccctcccccgcaacagcggggcaggagccagcagcggcggcagtggagagaatggtcgggtggtcagccatgacttccccaagtccatgcaatcgattccttgcatgagccacagttcagggatgcccttgggagccacgggattgtaactggagcagatggagaccccttggggagcaggctcgggctccccagccccatcccaaacccttcagtgccaaaaacaacaacaaaatgaaacgcaaccaccaccaaccactgcgaccacaagaaggatgattcaacaggttttcctgaagaattgaaaaaccattttgctgtcccttttccttttttgatgttctttcacccttttctgtttgctaagtgaggatgaaaaaataacactgtactgcaataaggggagagtaaccctgtctaatgaaacctgtgtctctgagagtagagtcactggaacactaatgaggaaactgcactgttttattttaattcagttgttagtgtgtcttagtgtgtgcaattttttttcttactaatatccatggtttgcaggttctgttaggccctttccttctccttacttcttatccccaactccctacccacccctcttcagttttcagattggagattcaagatttgttccactttacaagcaagaggaaaaaaaagcaaccttcaaactaattctccatgggggctctccatgttaccctccactccttggcccaaacctctgatggagatagacattgttggagaagtgggctgccttccccaagtggggcactgcttaagcacttattcagtggagaacacaggtgaaaagcaactcaggatgagggtggtggagagggcaggggcagatgtgcagtcagagaaggactcctgaagttactgctgctcagaaaaacagttcctttaatgtggaagagccatttcataggtcataggtggtatggtatatttcttcagagtcaaccttggccctgagaagtatgtcctcctggtgtgctcaggctcaacggcagtctggtggctgaaggcacttggcctcctaaaccaagcagaattttgggaagagataacagccagggagatattgcccatgattctcactttttctttgcctggcatctaagcaggaacccattgtggagtagactctcttcttctatggagcctctgacatggggagcaatgctaagcaagctaagtgtaaaagaaaagtgacagaataattttggaagaggaagcctcatcaaaagctcacacaaaatagagcttcccatggtgtgccctatcctaggtttaagaaaacacgtatgaagtttatgctgatgcaaagaacttgggtttttatgttaatataaagtgttgttttagcatgtggccagatgatgctctgtcatctttagaaagtgagataaccaaggaaataattgaaggagtatagggagatggattaagttgataatgacatttagggcaacttaagacctttgatcccaggttctaactcaaagaggctgaccttcccccagctaagatagcatgaggacgttgtattccaatatacgtatgattggggctacaaagctgaactaaagcaagattggtgaagtggcagggtttatagagagaagcccaggctgagttcagcttttgttggaagtgagaatccctgacatatagctttcttggagatcccaactctcattcttggtgcaactggcttccagctctccagcagtcactctcctaggtgcatgattcagtgcgtgccatgtgtcattagcttttactgataaccatattctggcttgttcccttaccccctacttctatccaattttctctgctaggggttatcattagcaattgacatgctaaaggttttggagcccacctaggggtaggtgcagctttattggcttttctgtggattctctcagtggacccacaccatctctatgtctctccactctcctgccttcagccatagcaaagaatccttccaaaatcaaactcttcacttttttgactcaagtgttgttgttcagtctctcgcgtgtcaatgtggtcatggttcatgaaaccggaccctcaagatggatgattgcttttaactactgccagctgatgtctctcagcccctgccctcatacaagatttttctcagccttcagcctaccactgcagaatccgatgtgacccaccattagggagtctgcatcttggaagagttggaaataaccctttaacatcaacatgcttcaaagactttttgcctttggcctagtaagatgcctctccagctactgagcccacaagtaacatgagcggataaaaagagacttgtttgtgctagaaatgagggtctatgctatgagggggtccaagactctggcgaaatgtgctttttcatcaatggagaaatgaaaggaaaacacaagcaagaaaaaagttaacttgtattatgtatttttactacacttttcttaaaaatagagcattgggaaaactctgaaagagactgacatttttctcaacaggaatccatacttaacagttctggctttcattaaattttgctctttggtacctgggccttttatttaacatctatatttgttttaactctcttggcagatgtgtgaaaggattcttgcttgatcaaacactaagtatttttttggttcttgtttttctttcaaatagccaggtttttttcttttggtatttgcataaaatgaaaatatcaccgaatattaaatcactgtggatccatta

SEQ ID NO: 588 - DNA, 5331 bp, Homo sapiens
  source 1..5331: mol_type = genomic DNA
agttaatctggctgtcagttggtgttaacgctgcagtttaagtgttcggattccaagggaaacagacaaacctcacgaaaggaaggaagcaagcaagcaaggaaggaactgcaggaggaaaagaacaggcagaacagcgagaagaataaagggaaagggggggaaacaccaaatctatgattggacctgggcttctttttcgccaatgcaaaaaggaatatgcagcacatttttgccttcttctgcaccggtttcctaggcgcggtagtaggtgccaatttccccaacaatatccagatcgtctgttcccagttctccaaaggagtctatgccatctttgggttttatgaacgtaggactgtcaacatgctgacctccttttgtggggccctccacgtctgcttcattacgccgagctttcccgttgatacatccaatcagtttgtccttcagctgcgccctgaactgcaggatgccctcatcagcatcattgaccattacaagtggcagaaatttgtctacatttatgatgccgaccggggcttatccgtcctgcagaaagtcctggatacagctgctgagaagaactggcaggtgacagcagtcaacattttgacaaccacagaggagggataccggatgctctttcaggacctggagaagaaaaaggagcggctggtggtggtggactgtgaatcagaacgcctcaatgctatcttgggccagattataaagctagagaagaatggcatcggctaccactacattcttgcaaatctgggcttcatggacattgacttaaacaaattcaaggagagtggcgccaatgtgacaggtttccagctggtgaactacacagacactattccggccaagatcatgcagcagtggaagaatagtgatgctcgagaccacacacgggtggactggaagagacccaagtacacctctgcgctcacctacgatggggtgaaggtgatggctgaggctttccagagcctgcggaggcagagaattgatatatctcgccgggggaatgctggggattgtctggctaacccagctgttccctggggccaagggatcgacatccagagagctctgcagcaggtgcgatttgaaggtttaacaggaaacgtgcagtttaatgagaaaggacgccggaccaactacacgctccacgtgattgaaatgaaacatgacggcatccgaaagattggttactggaatgaagatgataagtttgtccctgcagccaccgatgcccaagctgggggcgataattcaagtgttcagaacagaacatacatcgtcacaacaatcctagaagatccttatgtgatgctcaagaagaacgccaatcagtttgagggcaatgaccgttacgagggctactgtgtagagctggcggcagagattgccaagcacgtgggctactcctaccgtctggagattgtcagtgatggaaaatacggagcccgagaccctgacacgaaggcctggaatggcatggtgggagagctggtctatggaagagcagatgtggctgtggctcccttaactatcactttggtccgggaagaagttatagatttctccaaaccatttatgagtttggggatctccatcatgattaaaaaaccacagaaatccaagccgggtgtcttctccttccttgatcctttggcttatgagatttggatgtgcattgtttttgcctacattggagtgagtgttgtcctcttcctggtcagccgcttcagtccctatgaatggcacagtgaagagtttgaggaaggacgggaccagacaaccagtgaccagtccaatgagtttgggatattcaacagtttgtggttctccctgggagccttcatgcagcaaggatgtgacatttctcccaggtccctgtctggtcgcatcgttggtggcgtctggtggttcttcaccttaatcatcatctcctcatatacagccaatctggccgccttcctgaccgtggagaggatggtgtctcccattgagagtgcagaggacctagcgaagcagacagaaattgcctacgggacgctggaagcaggatctactaaggagttcttcaggaggtctaaaattgctgtgtttgagaagatgtggacatacatgaagtcagcagagccatcagtttttgtgcggaccacagaggaggggatgattcgagtgaggaaatccaaaggcaaatatgcctacctcctggagtccaccatgaatgagtacattgagcagcggaaaccctgtgacaccatgaaggtgggaggtaacttggattccaaaggctatggcattgcaacacccaaggggtctgccctgaggacaagacaagcgctctgagcctcagcaatgtggcaggcgtgttctacatcctgatcggaggacttggactagccatgctggttgccttaatcgagttctgctacaaatcccgtagtgaatccaagcggatgaagggtttttgtttgatcccacagcaatccatcaacgaagccatacggacatcgaccctcccccgcaacagcggggcaggagccagcagcggcggcagtggagagaatggtcgggtggtcagccatgacttccccaagtccatgcaatcgattccttgcatgagccacagttcagggatgcccttgggagccacgggattgtaactggagcagatggagaccccttggggagcaggctcgggctccccagccccatcccaaacccttcagtgccaaaaacaacaacaaaatgaaacgcaaccaccaccaaccactgcgaccacaagaaggatgattcaacaggttttcctgaagaattgaaaaaccattttgctgtcccttttccttttttgatgttctttcacccttttctgtttgctaagtgaggatgaaaaaataacactgtactgcaataaggggagagtaaccctgtctaatgaaacctgtgtctctgagagtagagtcactggaacactaatgaggaaactgcactgttttattttaattcagttgttagtgtgtcttagtgtgtgcaattttttttcttactaatatccatggtttgcaggttctgttaggccctttccttctccttacttcttatccccaactccctacccacccctcttcagttttcagattggagattcaagatttgttccactttacaagcaagaggaaaaaaaagcaaccttcaaactaattctccatgggggctctccatgttaccctccactccttggcccaaacctctgatggagatagacattgttggagaagtgggctgccttccccaagtggggcactgcttaagcacttattcagtggagaacacaggtgaaaagcaactcaggatgagggtggtggagagggcaggggcagatgtgcagtcagagaaggactcctgaagttactgctgctcagaaaaacagttcctttaatgtggaagagccatttcataggtcataggtggtatggtatatttcttcagagtcaaccttggccctgagaagtatgtcctcctggtgtgctcaggctcaacggcagtctggtggctgaaggcacttggcctcctaaaccaagcagaattttgggaagagataacagccagggagatattgcccatgattctcactttttctttgcctggcatctaagcaggaacccattgtggagtagactctcttcttctatggagcctctgacatggggagcaatgctaagcaagctaagtgtaaaagaaaagtgacagaataattttggaagaggaagcctcatcaaaagctcacacaaaatagagcttcccatggtgtgccctatcctaggtttaagaaaacacgtatgaagtttatgctgatgcaaagaacttgggtttttatgttaatataaagtgttgttttagcatgtggccagatgatgctctgtcatctttagaaagtgagataaccaaggaaataattgaaggagtatagggagatggattaagttgataatgacatttagggcaacttaagacctttgatcccaggttctaactcaaagaggctgaccttcccccagctaagatagcatgaggacgttgtattccaatatacgtatgattggggctacaaagctgaactaaagcaagattggtgaagtggcagggtttatagagagaagcccaggctgagttcagcttttgttggaagtgagaatccctgacatatagctttcttggagatcccaactctcattcttggtgcaactggcttccagctctccagcagtcactctcctaggtgcatgattcagtgcgtgccatgtgtcattagcttttactgataaccatattctggcttgttcccttaccccctacttctatccaattttctctgctaggggttatcattagcaattgacatgctaaaggttttggagcccacctaggggtaggtgcagctttattggcttttctgtggattctctcagtggacccacaccatctctatgtctctccactctcctgccttcagccatagcaaagaatccttccaaaatcaaactcttcacttttttgactcaagtgttgttgttcagtctctcgcgtgtcaatgtggtcatggttcatgaaaccggaccctcaagatggatgattgcttttaactactgccagctgatgtctctcagcccctgccctcatacaagatttttctcagccttcagcctaccactgcagaatccgatgtgacccaccattagggagtctgcatcttggaagagttggaaataaccctttaacatcaacatgcttcaaagactttttgcctttggcctagtaagatgcctctccagctactgagcccacaagtaacatgagcggataaaaagagacttgtttgtgctagaaatgagggtctatgctatgagggggtccaagactctggcgaaatgtgctttttcatcaatggagaaatgaaaggaaaacacaagcaagaaaaaagttaacttgtattatgtatttttactacacttttcttaaaaatagagcattgggaaaactctgaaagagactgacatttttctcaacaggaatccatacttaacagttctggctttcattaaattttgctctttggtacctgggccttttatttaacatctatatttgttttaactctcttggcagatgtgtgaaaggattcttgcttgatcaaacactaagtatttttttggttcttgtttttctttcaaatagccaggtttttttcttttggtatttgcataaaatgaaaatatcaccgaatattaaatcactgtggatccatta

SEQ ID NO: 589 - DNA, 5506 bp, Homo sapiens
  source 1..5506: mol_type = genomic DNA
aaaaactgtattctgtggcggctagtggctgctgctttgcatttaacactactatcctgaacacagctgatctctctacaggttatttcagcagaagccctggtctaggagagtctatgaagttccagcttacaccagacatgaccagcatccagaaagacctgaaagaagcttgaatcctctcactagaatccctgcaaaatgactcatgtaattgctctgtggggattatttccaaaccagcagtcacaggaacatgctgcttttagatttgctttgtcgcaactcacagagcccccgaagctgctcccccagattgatattgtgaacatcagcgacagctttgagatgacctatagattctgttcccagttctccaaaggagtctatgccatctttgggttttatgaacgtaggactgtcaacatgctgacctccttttgtggggccctccacgtctgcttcattacgccgagctttcccgttgatacatccaatcagtttgtccttcagctgcgccctgaactgcaggatgccctcatcagcatcattgaccattacaagtggcagaaatttgtctacatttatgatgccgaccggggcttatccgtcctgcagaaagtcctggatacagctgctgagaagaactggcaggtgacagcagtcaacattttgacaaccacagaggagggataccggatgctctttcaggacctggagaagaaaaaggagcggctggtggtggtggactgtgaatcagaacgcctcaatgctatcttgggccagattataaagctagagaagaatggcatcggctaccactacattcttgcaaatctgggcttcatggacattgacttaaacaaattcaaggagagtggcgccaatgtgacaggtttccagctggtgaactacacagacactattccggccaagatcatgcagcagtggaagaatagtgatgctcgagaccacacacgggtggactggaagagacccaagtacacctctgcgctcacctacgatggggtgaaggtgatggctgaggctttccagagcctgcggaggcagagaattgatatatctcgccgggggaatgctggggattgtctggctaacccagctgttccctggggccaagggatcgacatccagagagctctgcagcaggtgcgatttgaaggtttaacaggaaacgtgcagtttaatgagaaaggacgccggaccaactacacgctccacgtgattgaaatgaaacatgacggcatccgaaagattggttactggaatgaagatgataagtttgtccctgcagccaccgatgcccaagctgggggcgataattcaagtgttcagaacagaacatacatcgtcacaacaatcctagaagatccttatgtgatgctcaagaagaacgccaatcagtttgagggcaatgaccgttacgagggctactgtgtagagctggcggcagagattgccaagcacgtgggctactcctaccgtctggagattgtcagtgatggaaaatacggagcccgagaccctgacacgaaggcctggaatggcatggtgggagagctggtctatggaagagcagatgtggctgtggctcccttaactatcactttggtccgggaagaagttatagatttctccaaaccatttatgagtttggggatctccatcatgattaaaaaaccacagaaatccaagccgggtgtcttctccttccttgatcctttggcttatgagatttggatgtgcattgtttttgcctacattggagtgagtgttgtcctcttcctggtcagccgcttcagtccctatgaatggcacagtgaagagtttgaggaaggacgggaccagacaaccagtgaccagtccaatgagtttgggatattcaacagtttgtggttctccctgggagccttcatgcagcaaggatgtgacatttctcccaggtccctgtctggtcgcatcgttggtggcgtctggtggttcttcaccttaatcatcatctcctcatatacagccaatctggccgccttcctgaccgtggagaggatggtgtctcccattgagagtgcagaggacctagcgaagcagacagaaattgcctacgggacgctggaagcaggatctactaaggagttcttcaggaggtctaaaattgctgtgtttgagaagatgtggacatacatgaagtcagcagagccatcagtttttgtgcggaccacagaggaggggatgattcgagtgaggaaatccaaaggcaaatatgcctacctcctggagtccaccatgaatgagtacattgagcagcggaaaccctgtgacaccatgaaggtgggaggtaacttggattccaaaggctatggcattgcaacacccaaggggtctgccctgagaggtcccgtaaacctagcggttttgaaactcagtgagcaaggcgtcttagacaagctgaaaagcaaatggtggtacgataaaggggaatgtggaagcaaggactccggaagtaaggacaagacaagcgctctgagcctcagcaatgtggcaggcgtgttctacatcctgatcggaggacttggactagccatgctggttgccttaatcgagttctgctacaaatcccgtagtgaatccaagcggatgaagggtttttgtttgatcccacagcaatccatcaacgaagccatacggacatcgaccctcccccgcaacagcggggcaggagccagcagcggcggcagtggagagaatggtcgggtggtcagccatgacttccccaagtccatgcaatcgattccttgcatgagccacagttcagggatgcccttgggagccacgggattgtaactggagcagatggagaccccttggggagcaggctcgggctccccagccccatcccaaacccttcagtgccaaaaacaacaacaaaatgaaacgcaaccaccaccaaccactgcgaccacaagaaggatgattcaacaggttttcctgaagaattgaaaaaccattttgctgtcccttttccttttttgatgttctttcacccttttctgtttgctaagtgaggatgaaaaaataacactgtactgcaataaggggagagtaaccctgtctaatgaaacctgtgtctctgagagtagagtcactggaacactaatgaggaaactgcactgttttattttaattcagttgttagtgtgtcttagtgtgtgcaattttttttcttactaatatccatggtttgcaggttctgttaggccctttccttctccttacttcttatccccaactccctacccacccctcttcagttttcagattggagattcaagatttgttccactttacaagcaagaggaaaaaaaagcaaccttcaaactaattctccatgggggctctccatgttaccctccactccttggcccaaacctctgatggagatagacattgttggagaagtgggctgccttccccaagtggggcactgcttaagcacttattcagtggagaacacaggtgaaaagcaactcaggatgagggtggtggagagggcaggggcagatgtgcagtcagagaaggactcctgaagttactgctgctcagaaaaacagttcctttaatgtggaagagccatttcataggtcataggtggtatggtatatttcttcagagtcaaccttggccctgagaagtatgtcctcctggtgtgctcaggctcaacggcagtctggtggctgaaggcacttggcctcctaaaccaagcagaattttgggaagagataacagccagggagatattgcccatgattctcactttttctttgcctggcatctaagcaggaacccattgtggagtagactctcttcttctatggagcctctgacatggggagcaatgctaagcaagctaagtgtaaaagaaaagtgacagaataattttggaagaggaagcctcatcaaaagctcacacaaaatagagcttcccatggtgtgccctatcctaggtttaagaaaacacgtatgaagtttatgctgatgcaaagaacttgggtttttatgttaatataaagtgttgttttagcatgtggccagatgatgctctgtcatctttagaaagtgagataaccaaggaaataattgaaggagtatagggagatggattaagttgataatgacatttagggcaacttaagacctttgatcccaggttctaactcaaagaggctgaccttcccccagctaagatagcatgaggacgttgtattccaatatacgtatgattggggctacaaagctgaactaaagcaagattggtgaagtggcagggtttatagagagaagcccaggctgagttcagcttttgttggaagtgagaatccctgacatatagctttcttggagatcccaactctcattcttggtgcaactggcttccagctctccagcagtcactctcctaggtgcatgattcagtgcgtgccatgtgtcattagcttttactgataaccatattctggcttgttcccttaccccctacttctatccaattttctctgctaggggttatcattagcaattgacatgctaaaggttttggagcccacctaggggtaggtgcagctttattggcttttctgtggattctctcagtggacccacaccatctctatgtctctccactctcctgccttcagccatagcaaagaatccttccaaaatcaaactcttcacttttttgactcaagtgttgttgttcagtctctcgcgtgtcaatgtggtcatggttcatgaaaccggaccctcaagatggatgattgcttttaactactgccagctgatgtctctcagcccctgccctcatacaagatttttctcagccttcagcctaccactgcagaatccgatgtgacccaccattagggagtctgcatcttggaagagttggaaataaccctttaacatcaacatgcttcaaagactttttgcctttggcctagtaagatgcctctccagctactgagcccacaagtaacatgagcggataaaaagagacttgtttgtgctagaaatgagggtctatgctatgagggggtccaagactctggcgaaatgtgctttttcatcaatggagaaatgaaaggaaaacacaagcaagaaaaaagttaacttgtattatgtatttttactacacttttcttaaaaatagagcattgggaaaactctgaaagagactgacatttttctcaacaggaatccatacttaacagttctggctttcattaaattttgctctttggtacctgggccttttatttaacatctatatttgttttaactctcttggcagatgtgtgaaaggattcttgcttgatcaaacactaagtatttttttggttcttgtttttctttcaaatagccaggtttttttcttttggtatttgcataaaatgaaaatatcaccgaatattaaatcactgtggatccatta

SEQ ID NO: 590 - DNA, 6031 bp, Homo sapiens
  source 1..6031: mol_type = genomic DNA
agttaatctggctgtcagttggtgttaacgctgcagtttaagtgttcggattccaagggaaacagacaaacctcacgaaaggaaggaagcaagcaagcaaggaaggaactgcaggaggaaaagaacaggcagaacagcgagaagaataaagggaaagggggggaaacaccaaatctatgattggacctgggcttctttttcgccaatgcaaaaaggaatatgcagcacatttttgccttcttctgcaccggtttcctaggcgcggtagtaggtgccaatttccccaacaatatccagatcggtgagtgagggggcagcctggggagggactttctgggtctggccagggatttttttggggataggggttgtgtaccccctccccggtactgactgttttgcttggctccctaaagctgtgctgcggtaacagaagggagacttgggcttacagccagaggagggggcttctcctgatcggatgaggggcagaggggaagtgttcacacacgcacacataccctactcgcactccaggcaagagcatgtgaaatggaggaaccatcgctttggaggaaaaaaaaaatcaggctggaaagggtggtgggtgtttaaggagttaactctattgcttggtagatggtgcttgattccatttttaatcctctccagctagctggcggcttggagtggccatggagtaacttgctttgtttcctgacacctgttaagctacatcctgaagtgtggggattatttccaaaccagcagtcacaggaacatgctgcttttagatttgctttgtcgcaactcacagagcccccgaagctgctcccccagattgatattgtgaacatcagcgacagctttgagatgacctatagattctgttcccagttctccaaaggagtctatgccatctttgggttttatgaacgtaggactgtcaacatgctgacctccttttgtggggccctccacgtctgcttcattacgccgagctttcccgttgatacatccaatcagtttgtccttcagctgcgccctgaactgcaggatgccctcatcagcatcattgaccattacaagtggcagaaatttgtctacatttatgatgccgaccggggcttatccgtcctgcagaaagtcctggatacagctgctgagaagaactggcaggtgacagcagtcaacattttgacaaccacagaggagggataccggatgctctttcaggacctggagaagaaaaaggagcggctggtggtggtggactgtgaatcagaacgcctcaatgctatcttgggccagattataaagctagagaagaatggcatcggctaccactacattcttgcaaatctgggcttcatggacattgacttaaacaaattcaaggagagtggcgccaatgtgacaggtttccagctggtgaactacacagacactattccggccaagatcatgcagcagtggaagaatagtgatgctcgagaccacacacgggtggactggaagagacccaagtacacctctgcgctcacctacgatggggtgaaggtgatggctgaggctttccagagcctgcggaggcagagaattgatatatctcgccgggggaatgctggggattgtctggctaacccagctgttccctggggccaagggatcgacatccagagagctctgcagcaggtgcgatttgaaggtttaacaggaaacgtgcagtttaatgagaaaggacgccggaccaactacacgctccacgtgattgaaatgaaacatgacggcatccgaaagattggttactggaatgaagatgataagtttgtccctgcagccaccgatgcccaagctgggggcgataattcaagtgttcagaacagaacatacatcgtcacaacaatcctagaagatccttatgtgatgctcaagaagaacgccaatcagtttgagggcaatgaccgttacgagggctactgtgtagagctggcggcagagattgccaagcacgtgggctactcctaccgtctggagattgtcagtgatggaaaatacggagcccgagaccctgacacgaaggcctggaatggcatggtgggagagctggtctatggaagagcagatgtggctgtggctcccttaactatcactttggtccgggaagaagttatagatttctccaaaccatttatgagtttggggatctccatcatgattaaaaaaccacagaaatccaagccgggtgtcttctccttccttgatcctttggcttatgagatttggatgtgcattgtttttgcctacattggagtgagtgttgtcctcttcctggtcagccgcttcagtccctatgaatggcacagtgaagagtttgaggaaggacgggaccagacaaccagtgaccagtccaatgagtttgggatattcaacagtttgtggttctccctgggagccttcatgcagcaaggatgtgacatttctcccaggtccctgtctggtcgcatcgttggtggcgtctggtggttcttcaccttaatcatcatctcctcatatacagccaatctggccgccttcctgaccgtggagaggatggtgtctcccattgagagtgcagaggacctagcgaagcagacagaaattgcctacgggacgctggaagcaggatctactaaggagttcttcaggaggtctaaaattgctgtgtttgagaagatgtggacatacatgaagtcagcagagccatcagtttttgtgcggaccacagaggaggggatgattcgagtgaggaaatccaaaggcaaatatgcctacctcctggagtccaccatgaatgagtacattgagcagcggaaaccctgtgacaccatgaaggtgggaggtaacttggattccaaaggctatggcattgcaacacccaaggggtctgccctgagaggtcccgtaaacctagcggttttgaaactcagtgagcaaggcgtcttagacaagctgaaaagcaaatggtggtacgataaaggggaatgtggaagcaaggactccggaagtaaggacaagacaagcgctctgagcctcagcaatgtggcaggcgtgttctacatcctgatcggaggacttggactagccatgctggttgccttaatcgagttctgctacaaatcccgtagtgaatccaagcggatgaagggtttttgtttgatcccacagcaatccatcaacgaagccatacggacatcgaccctcccccgcaacagcggggcaggagccagcagcggcggcagtggagagaatggtcgggtggtcagccatgacttccccaagtccatgcaatcgattccttgcatgagccacagttcagggatgcccttgggagccacgggattgtaactggagcagatggagaccccttggggagcaggctcgggctccccagccccatcccaaacccttcagtgccaaaaacaacaacaaaatgaaacgcaaccaccaccaaccactgcgaccacaagaaggatgattcaacaggttttcctgaagaattgaaaaaccattttgctgtcccttttccttttttgatgttctttcacccttttctgtttgctaagtgaggatgaaaaaataacactgtactgcaataaggggagagtaaccctgtctaatgaaacctgtgtctctgagagtagagtcactggaacactaatgaggaaactgcactgttttattttaattcagttgttagtgtgtcttagtgtgtgcaattttttttcttactaatatccatggtttgcaggttctgttaggccctttccttctccttacttcttatccccaactccctacccacccctcttcagttttcagattggagattcaagatttgttccactttacaagcaagaggaaaaaaaagcaaccttcaaactaattctccatgggggctctccatgttaccctccactccttggcccaaacctctgatggagatagacattgttggagaagtgggctgccttccccaagtggggcactgcttaagcacttattcagtggagaacacaggtgaaaagcaactcaggatgagggtggtggagagggcaggggcagatgtgcagtcagagaaggactcctgaagttactgctgctcagaaaaacagttcctttaatgtggaagagccatttcataggtcataggtggtatggtatatttcttcagagtcaaccttggccctgagaagtatgtcctcctggtgtgctcaggctcaacggcagtctggtggctgaaggcacttggcctcctaaaccaagcagaattttgggaagagataacagccagggagatattgcccatgattctcactttttctttgcctggcatctaagcaggaacccattgtggagtagactctcttcttctatggagcctctgacatggggagcaatgctaagcaagctaagtgtaaaagaaaagtgacagaataattttggaagaggaagcctcatcaaaagctcacacaaaatagagcttcccatggtgtgccctatcctaggtttaagaaaacacgtatgaagtttatgctgatgcaaagaacttgggtttttatgttaatataaagtgttgttttagcatgtggccagatgatgctctgtcatctttagaaagtgagataaccaaggaaataattgaaggagtatagggagatggattaagttgataatgacatttagggcaacttaagacctttgatcccaggttctaactcaaagaggctgaccttcccccagctaagatagcatgaggacgttgtattccaatatacgtatgattggggctacaaagctgaactaaagcaagattggtgaagtggcagggtttatagagagaagcccaggctgagttcagcttttgttggaagtgagaatccctgacatatagctttcttggagatcccaactctcattcttggtgcaactggcttccagctctccagcagtcactctcctaggtgcatgattcagtgcgtgccatgtgtcattagcttttactgataaccatattctggcttgttcccttaccccctacttctatccaattttctctgctaggggttatcattagcaattgacatgctaaaggttttggagcccacctaggggtaggtgcagctttattggcttttctgtggattctctcagtggacccacaccatctctatgtctctccactctcctgccttcagccatagcaaagaatccttccaaaatcaaactcttcacttttttgactcaagtgttgttgttcagtctctcgcgtgtcaatgtggtcatggttcatgaaaccggaccctcaagatggatgattgcttttaactactgccagctgatgtctctcagcccctgccctcatacaagatttttctcagccttcagcctaccactgcagaatccgatgtgacccaccattagggagtctgcatcttggaagagttggaaataaccctttaacatcaacatgcttcaaagactttttgcctttggcctagtaagatgcctctccagctactgagcccacaagtaacatgagcggataaaaagagacttgtttgtgctagaaatgagggtctatgctatgagggggtccaagactctggcgaaatgtgctttttcatcaatggagaaatgaaaggaaaacacaagcaagaaaaaagttaacttgtattatgtatttttactacacttttcttaaaaatagagcattgggaaaactctgaaagagactgacatttttctcaacaggaatccatacttaacagttctggctttcattaaattttgctctttggtacctgggccttttatttaacatctatatttgttttaactctcttggcagatgtgtgaaaggattcttgcttgatcaaacactaagtatttttttggttcttgtttttctttcaaatagccaggtttttttcttttggtatttgcataaaatgaaaatatcaccgaatattaaatcactgtggatccatta

SEQ ID NO: 591 - DNA, 5946 bp, Homo sapiens
  source 1..5946: mol_type = genomic DNA
agttaatctggctgtcagttggtgttaacgctgcagtttaagtgttcggattccaagggaaacagacaaacctcacgaaaggaaggaagcaagcaagcaaggaaggaactgcaggaggaaaagaacaggcagaacagcgagaagaataaagggaaagggggggaaacaccaaatctatgattggacctgggcttctttttcgccaatgcaaaaaggaatatgcagcacatttttgccttcttctgcaccggtttcctaggcgcggtagtaggtgccaatttccccaacaatatccagatcggtgagtgagggggcagcctggggagggactttctgggtctggccagggatttttttggggataggggttgtgtaccccctccccggtactgactgttttgcttggctccctaaagctgtgctgcggtaacagaagggagacttgggcttacagccagaggagggggcttctcctgatcggatgaggggcagaggggaagtgttcacacacgcacacataccctactcgcactccaggcaagagcatgtgaaatggaggaaccatcgctttggaggaaaaaaaaaatcaggctggaaagggtggtgggtgtttaaggagttaactctattgcttggtagatggtgcttgattccatttttaatggggattatttccaaaccagcagtcacaggaacatgctgcttttagatttgctttgtcgcaactcacagagcccccgaagctgctcccccagattgatattgtgaacatcagcgacagctttgagatgacctatagattctgttcccagttctccaaaggagtctatgccatctttgggttttatgaacgtaggactgtcaacatgctgacctccttttgtggggccctccacgtctgcttcattacgccgagctttcccgttgatacatccaatcagtttgtccttcagctgcgccctgaactgcaggatgccctcatcagcatcattgaccattacaagtggcagaaatttgtctacatttatgatgccgaccggggcttatccgtcctgcagaaagtcctggatacagctgctgagaagaactggcaggtgacagcagtcaacattttgacaaccacagaggagggataccggatgctctttcaggacctggagaagaaaaaggagcggctggtggtggtggactgtgaatcagaacgcctcaatgctatcttgggccagattataaagctagagaagaatggcatcggctaccactacattcttgcaaatctgggcttcatggacattgacttaaacaaattcaaggagagtggcgccaatgtgacaggtttccagctggtgaactacacagacactattccggccaagatcatgcagcagtggaagaatagtgatgctcgagaccacacacgggtggactggaagagacccaagtacacctctgcgctcacctacgatggggtgaaggtgatggctgaggctttccagagcctgcggaggcagagaattgatatatctcgccgggggaatgctggggattgtctggctaacccagctgttccctggggccaagggatcgacatccagagagctctgcagcaggtgcgatttgaaggtttaacaggaaacgtgcagtttaatgagaaaggacgccggaccaactacacgctccacgtgattgaaatgaaacatgacggcatccgaaagattggttactggaatgaagatgataagtttgtccctgcagccaccgatgcccaagctgggggcgataattcaagtgttcagaacagaacatacatcgtcacaacaatcctagaagatccttatgtgatgctcaagaagaacgccaatcagtttgagggcaatgaccgttacgagggctactgtgtagagctggcggcagagattgccaagcacgtgggctactcctaccgtctggagattgtcagtgatggaaaatacggagcccgagaccctgacacgaaggcctggaatggcatggtgggagagctggtctatggaagagcagatgtggctgtggctcccttaactatcactttggtccgggaagaagttatagatttctccaaaccatttatgagtttggggatctccatcatgattaaaaaaccacagaaatccaagccgggtgtcttctccttccttgatcctttggcttatgagatttggatgtgcattgtttttgcctacattggagtgagtgttgtcctcttcctggtcagccgcttcagtccctatgaatggcacagtgaagagtttgaggaaggacgggaccagacaaccagtgaccagtccaatgagtttgggatattcaacagtttgtggttctccctgggagccttcatgcagcaaggatgtgacatttctcccaggtccctgtctggtcgcatcgttggtggcgtctggtggttcttcaccttaatcatcatctcctcatatacagccaatctggccgccttcctgaccgtggagaggatggtgtctcccattgagagtgcagaggacctagcgaagcagacagaaattgcctacgggacgctggaagcaggatctactaaggagttcttcaggaggtctaaaattgctgtgtttgagaagatgtggacatacatgaagtcagcagagccatcagtttttgtgcggaccacagaggaggggatgattcgagtgaggaaatccaaaggcaaatatgcctacctcctggagtccaccatgaatgagtacattgagcagcggaaaccctgtgacaccatgaaggtgggaggtaacttggattccaaaggctatggcattgcaacacccaaggggtctgccctgagaggtcccgtaaacctagcggttttgaaactcagtgagcaaggcgtcttagacaagctgaaaagcaaatggtggtacgataaaggggaatgtggaagcaaggactccggaagtaaggacaagacaagcgctctgagcctcagcaatgtggcaggcgtgttctacatcctgatcggaggacttggactagccatgctggttgccttaatcgagttctgctacaaatcccgtagtgaatccaagcggatgaagggtttttgtttgatcccacagcaatccatcaacgaagccatacggacatcgaccctcccccgcaacagcggggcaggagccagcagcggcggcagtggagagaatggtcgggtggtcagccatgacttccccaagtccatgcaatcgattccttgcatgagccacagttcagggatgcccttgggagccacgggattgtaactggagcagatggagaccccttggggagcaggctcgggctccccagccccatcccaaacccttcagtgccaaaaacaacaacaaaatgaaacgcaaccaccaccaaccactgcgaccacaagaaggatgattcaacaggttttcctgaagaattgaaaaaccattttgctgtcccttttccttttttgatgttctttcacccttttctgtttgctaagtgaggatgaaaaaataacactgtactgcaataaggggagagtaaccctgtctaatgaaacctgtgtctctgagagtagagtcactggaacactaatgaggaaactgcactgttttattttaattcagttgttagtgtgtcttagtgtgtgcaattttttttcttactaatatccatggtttgcaggttctgttaggccctttccttctccttacttcttatccccaactccctacccacccctcttcagttttcagattggagattcaagatttgttccactttacaagcaagaggaaaaaaaagcaaccttcaaactaattctccatgggggctctccatgttaccctccactccttggcccaaacctctgatggagatagacattgttggagaagtgggctgccttccccaagtggggcactgcttaagcacttattcagtggagaacacaggtgaaaagcaactcaggatgagggtggtggagagggcaggggcagatgtgcagtcagagaaggactcctgaagttactgctgctcagaaaaacagttcctttaatgtggaagagccatttcataggtcataggtggtatggtatatttcttcagagtcaaccttggccctgagaagtatgtcctcctggtgtgctcaggctcaacggcagtctggtggctgaaggcacttggcctcctaaaccaagcagaattttgggaagagataacagccagggagatattgcccatgattctcactttttctttgcctggcatctaagcaggaacccattgtggagtagactctcttcttctatggagcctctgacatggggagcaatgctaagcaagctaagtgtaaaagaaaagtgacagaataattttggaagaggaagcctcatcaaaagctcacacaaaatagagcttcccatggtgtgccctatcctaggtttaagaaaacacgtatgaagtttatgctgatgcaaagaacttgggtttttatgttaatataaagtgttgttttagcatgtggccagatgatgctctgtcatctttagaaagtgagataaccaaggaaataattgaaggagtatagggagatggattaagttgataatgacatttagggcaacttaagacctttgatcccaggttctaactcaaagaggctgaccttcccccagctaagatagcatgaggacgttgtattccaatatacgtatgattggggctacaaagctgaactaaagcaagattggtgaagtggcagggtttatagagagaagcccaggctgagttcagcttttgttggaagtgagaatccctgacatatagctttcttggagatcccaactctcattcttggtgcaactggcttccagctctccagcagtcactctcctaggtgcatgattcagtgcgtgccatgtgtcattagcttttactgataaccatattctggcttgttcccttaccccctacttctatccaattttctctgctaggggttatcattagcaattgacatgctaaaggttttggagcccacctaggggtaggtgcagctttattggcttttctgtggattctctcagtggacccacaccatctctatgtctctccactctcctgccttcagccatagcaaagaatccttccaaaatcaaactcttcacttttttgactcaagtgttgttgttcagtctctcgcgtgtcaatgtggtcatggttcatgaaaccggaccctcaagatggatgattgcttttaactactgccagctgatgtctctcagcccctgccctcatacaagatttttctcagccttcagcctaccactgcagaatccgatgtgacccaccattagggagtctgcatcttggaagagttggaaataaccctttaacatcaacatgcttcaaagactttttgcctttggcctagtaagatgcctctccagctactgagcccacaagtaacatgagcggataaaaagagacttgtttgtgctagaaatgagggtctatgctatgagggggtccaagactctggcgaaatgtgctttttcatcaatggagaaatgaaaggaaaacacaagcaagaaaaaagttaacttgtattatgtatttttactacacttttcttaaaaatagagcattgggaaaactctgaaagagactgacatttttctcaacaggaatccatacttaacagttctggctttcattaaattttgctctttggtacctgggccttttatttaacatctatatttgttttaactctcttggcagatgtgtgaaaggattcttgcttgatcaaacactaagtatttttttggttcttgtttttctttcaaatagccaggtttttttcttttggtatttgcataaaatgaaaatatcaccgaatattaaatcactgtggatccatta

SEQ ID NO: 592 - DNA, 5641 bp, Homo sapiens
  source 1..5641: mol_type = genomic DNA
agttaatctggctgtcagttggtgttaacgctgcagtttaagtgttcggattccaagggaaacagacaaacctcacgaaaggaaggaagcaagcaagcaaggaaggaactgcaggaggaaaagaacaggcagaacagcgagaagaataaagggaaagggggggaaacaccaaatctatgattggacctgggcttctttttcgccaatgcaaaaaggaatatgcagcacatttttgccttcttctgcaccggtttcctaggcgcggtagtaggtgccaatttccccaacaatatccagatcgggggattatttccaaaccagcagtcacaggaacatgctgcttttagatttgctttgtcgcaactcacagagcccccgaagctgctcccccagattgatattgtgaacatcagcgacagctttgagatgacctatagatttgtgcagattgaaggagatcaacttggaaagtgcttagcataaggcctggcatagatctgttcccagttctccaaaggagtctatgccatctttgggttttatgaacgtaggactgtcaacatgctgacctccttttgtggggccctccacgtctgcttcattacgccgagctttcccgttgatacatccaatcagtttgtccttcagctgcgccctgaactgcaggatgccctcatcagcatcattgaccattacaagtggcagaaatttgtctacatttatgatgccgaccggggcttatccgtcctgcagaaagtcctggatacagctgctgagaagaactggcaggtgacagcagtcaacattttgacaaccacagaggagggataccggatgctctttcaggacctggagaagaaaaaggagcggctggtggtggtggactgtgaatcagaacgcctcaatgctatcttgggccagattataaagctagagaagaatggcatcggctaccactacattcttgcaaatctgggcttcatggacattgacttaaacaaattcaaggagagtggcgccaatgtgacaggtttccagctggtgaactacacagacactattccggccaagatcatgcagcagtggaagaatagtgatgctcgagaccacacacgggtggactggaagagacccaagtacacctctgcgctcacctacgatggggtgaaggtgatggctgaggctttccagagcctgcggaggcagagaattgatatatctcgccgggggaatgctggggattgtctggctaacccagctgttccctggggccaagggatcgacatccagagagctctgcagcaggtgcgatttgaaggtttaacaggaaacgtgcagtttaatgagaaaggacgccggaccaactacacgctccacgtgattgaaatgaaacatgacggcatccgaaagattggttactggaatgaagatgataagtttgtccctgcagccaccgatgcccaagctgggggcgataattcaagtgttcagaacagaacatacatcgtcacaacaatcctagaagatccttatgtgatgctcaagaagaacgccaatcagtttgagggcaatgaccgttacgagggctactgtgtagagctggcggcagagattgccaagcacgtgggctactcctaccgtctggagattgtcagtgatggaaaatacggagcccgagaccctgacacgaaggcctggaatggcatggtgggagagctggtctatggaagagcagatgtggctgtggctcccttaactatcactttggtccgggaagaagttatagatttctccaaaccatttatgagtttggggatctccatcatgattaaaaaaccacagaaatccaagccgggtgtcttctccttccttgatcctttggcttatgagatttggatgtgcattgtttttgcctacattggagtgagtgttgtcctcttcctggtcagccgcttcagtccctatgaatggcacagtgaagagtttgaggaaggacgggaccagacaaccagtgaccagtccaatgagtttgggatattcaacagtttgtggttctccctgggagccttcatgcagcaaggatgtgacatttctcccaggtccctgtctggtcgcatcgttggtggcgtctggtggttcttcaccttaatcatcatctcctcatatacagccaatctggccgccttcctgaccgtggagaggatggtgtctcccattgagagtgcagaggacctagcgaagcagacagaaattgcctacgggacgctggaagcaggatctactaaggagttcttcaggaggtctaaaattgctgtgtttgagaagatgtggacatacatgaagtcagcagagccatcagtttttgtgcggaccacagaggaggggatgattcgagtgaggaaatccaaaggcaaatatgcctacctcctggagtccaccatgaatgagtacattgagcagcggaaaccctgtgacaccatgaaggtgggaggtaacttggattccaaaggctatggcattgcaacacccaaggggtctgccctgagaggtcccgtaaacctagcggttttgaaactcagtgagcaaggcgtcttagacaagctgaaaagcaaatggtggtacgataaaggggaatgtggaagcaaggactccggaagtaaggacaagacaagcgctctgagcctcagcaatgtggcaggcgtgttctacatcctgatcggaggacttggactagccatgctggttgccttaatcgagttctgctacaaatcccgtagtgaatccaagcggatgaagggtttttgtttgatcccacagcaatccatcaacgaagccatacggacatcgaccctcccccgcaacagcggggcaggagccagcagcggcggcagtggagagaatggtcgggtggtcagccatgacttccccaagtccatgcaatcgattccttgcatgagccacagttcagggatgcccttgggagccacgggattgtaactggagcagatggagaccccttggggagcaggctcgggctccccagccccatcccaaacccttcagtgccaaaaacaacaacaaaatgaaacgcaaccaccaccaaccactgcgaccacaagaaggatgattcaacaggttttcctgaagaattgaaaaaccattttgctgtcccttttccttttttgatgttctttcacccttttctgtttgctaagtgaggatgaaaaaataacactgtactgcaataaggggagagtaaccctgtctaatgaaacctgtgtctctgagagtagagtcactggaacactaatgaggaaactgcactgttttattttaattcagttgttagtgtgtcttagtgtgtgcaattttttttcttactaatatccatggtttgcaggttctgttaggccctttccttctccttacttcttatccccaactccctacccacccctcttcagttttcagattggagattcaagatttgttccactttacaagcaagaggaaaaaaaagcaaccttcaaactaattctccatgggggctctccatgttaccctccactccttggcccaaacctctgatggagatagacattgttggagaagtgggctgccttccccaagtggggcactgcttaagcacttattcagtggagaacacaggtgaaaagcaactcaggatgagggtggtggagagggcaggggcagatgtgcagtcagagaaggactcctgaagttactgctgctcagaaaaacagttcctttaatgtggaagagccatttcataggtcataggtggtatggtatatttcttcagagtcaaccttggccctgagaagtatgtcctcctggtgtgctcaggctcaacggcagtctggtggctgaaggcacttggcctcctaaaccaagcagaattttgggaagagataacagccagggagatattgcccatgattctcactttttctttgcctggcatctaagcaggaacccattgtggagtagactctcttcttctatggagcctctgacatggggagcaatgctaagcaagctaagtgtaaaagaaaagtgacagaataattttggaagaggaagcctcatcaaaagctcacacaaaatagagcttcccatggtgtgccctatcctaggtttaagaaaacacgtatgaagtttatgctgatgcaaagaacttgggtttttatgttaatataaagtgttgttttagcatgtggccagatgatgctctgtcatctttagaaagtgagataaccaaggaaataattgaaggagtatagggagatggattaagttgataatgacatttagggcaacttaagacctttgatcccaggttctaactcaaagaggctgaccttcccccagctaagatagcatgaggacgttgtattccaatatacgtatgattggggctacaaagctgaactaaagcaagattggtgaagtggcagggtttatagagagaagcccaggctgagttcagcttttgttggaagtgagaatccctgacatatagctttcttggagatcccaactctcattcttggtgcaactggcttccagctctccagcagtcactctcctaggtgcatgattcagtgcgtgccatgtgtcattagcttttactgataaccatattctggcttgttcccttaccccctacttctatccaattttctctgctaggggttatcattagcaattgacatgctaaaggttttggagcccacctaggggtaggtgcagctttattggcttttctgtggattctctcagtggacccacaccatctctatgtctctccactctcctgccttcagccatagcaaagaatccttccaaaatcaaactcttcacttttttgactcaagtgttgttgttcagtctctcgcgtgtcaatgtggtcatggttcatgaaaccggaccctcaagatggatgattgcttttaactactgccagctgatgtctctcagcccctgccctcatacaagatttttctcagccttcagcctaccactgcagaatccgatgtgacccaccattagggagtctgcatcttggaagagttggaaataaccctttaacatcaacatgcttcaaagactttttgcctttggcctagtaagatgcctctccagctactgagcccacaagtaacatgagcggataaaaagagacttgtttgtgctagaaatgagggtctatgctatgagggggtccaagactctggcgaaatgtgctttttcatcaatggagaaatgaaaggaaaacacaagcaagaaaaaagttaacttgtattatgtatttttactacacttttcttaaaaatagagcattgggaaaactctgaaagagactgacatttttctcaacaggaatccatacttaacagttctggctttcattaaattttgctctttggtacctgggccttttatttaacatctatatttgttttaactctcttggcagatgtgtgaaaggattcttgcttgatcaaacactaagtatttttttggttcttgtttttctttcaaatagccaggtttttttcttttggtatttgcataaaatgaaaatatcaccgaatattaaatcactgtggatccatta

SEQ ID NO: 593 - DNA, 5584 bp, Homo sapiens
  source 1..5584: mol_type = genomic DNA
agttaatctggctgtcagttggtgttaacgctgcagtttaagtgttcggattccaagggaaacagacaaacctcacgaaaggaaggaagcaagcaagcaaggaaggaactgcaggaggaaaagaacaggcagaacagcgagaagaataaagggaaagggggggaaacaccaaatctatgattggacctgggcttctttttcgccaatgcaaaaaggaatatgcagcacatttttgccttcttctgcaccggtttcctaggcgcggtagtaggtgccaatttccccaacaatatccagatcgggggattatttccaaaccagcagtcacaggaacatgctgcttttagatttgctttgtcgcaactcacagagcccccgaagctgctcccccagattgatattgtgaacatcagcgacagctttgagatgacctatagattctgttcccagttctccaaaggagtctatgccatctttgggttttatgaacgtaggactgtcaacatgctgacctccttttgtggggccctccacgtctgcttcattacgccgagctttcccgttgatacatccaatcagtttgtccttcagctgcgccctgaactgcaggatgccctcatcagcatcattgaccattacaagtggcagaaatttgtctacatttatgatgccgaccggggcttatccgtcctgcagaaagtcctggatacagctgctgagaagaactggcaggtgacagcagtcaacattttgacaaccacagaggagggataccggatgctctttcaggacctggagaagaaaaaggagcggctggtggtggtggactgtgaatcagaacgcctcaatgctatcttgggccagattataaagctagagaagaatggcatcggctaccactacattcttgcaaatctgggcttcatggacattgacttaaacaaattcaaggagagtggcgccaatgtgacaggtttccagctggtgaactacacagacactattccggccaagatcatgcagcagtggaagaatagtgatgctcgagaccacacacgggtggactggaagagacccaagtacacctctgcgctcacctacgatggggtgaaggtgatggctgaggctttccagagcctgcggaggcagagaattgatatatctcgccgggggaatgctggggattgtctggctaacccagctgttccctggggccaagggatcgacatccagagagctctgcagcaggtgcgatttgaaggtttaacaggaaacgtgcagtttaatgagaaaggacgccggaccaactacacgctccacgtgattgaaatgaaacatgacggcatccgaaagattggttactggaatgaagatgataagtttgtccctgcagccaccgatgcccaagctgggggcgataattcaagtgttcagaacagaacatacatcgtcacaacaatcctagaagatccttatgtgatgctcaagaagaacgccaatcagtttgagggcaatgaccgttacgagggctactgtgtagagctggcggcagagattgccaagcacgtgggctactcctaccgtctggagattgtcagtgatggaaaatacggagcccgagaccctgacacgaaggcctggaatggcatggtgggagagctggtctatggaagagcagatgtggctgtggctcccttaactatcactttggtccgggaagaagttatagatttctccaaaccatttatgagtttggggatctccatcatgattaaaaaaccacagaaatccaagccgggtgtcttctccttccttgatcctttggcttatgagatttggatgtgcattgtttttgcctacattggagtgagtgttgtcctcttcctggtcagccgcttcagtccctatgaatggcacagtgaagagtttgaggaaggacgggaccagacaaccagtgaccagtccaatgagtttgggatattcaacagtttgtggttctccctgggagccttcatgcagcaaggatgtgacatttctcccaggtccctgtctggtcgcatcgttggtggcgtctggtggttcttcaccttaatcatcatctcctcatatacagccaatctggccgccttcctgaccgtggagaggatggtgtctcccattgagagtgcagaggacctagcgaagcagacagaaattgcctacgggacgctggaagcaggatctactaaggagttcttcaggaggtctaaaattgctgtgtttgagaagatgtggacatacatgaagtcagcagagccatcagtttttgtgcggaccacagaggaggggatgattcgagtgaggaaatccaaaggcaaatatgcctacctcctggagtccaccatgaatgagtacattgagcagcggaaaccctgtgacaccatgaaggtgggaggtaacttggattccaaaggctatggcattgcaacacccaaggggtctgccctgagaaatccagtaaacctggcagtgttaaaactgaacgagcaggggcttttggacaaattgaaaaacaaatggtggtacgacaagggcgagtgcggcagcgggggaggtgattccaaggacaagacaagcgctctgagcctcagcaatgtggcaggcgtgttctacatcctgatcggaggacttggactagccatgctggttgccttaatcgagttctgctacaaatcccgtagtgaatccaagcggatgaagggtttttgtttgatcccacagcaatccatcaacgaagccatacggacatcgaccctcccccgcaacagcggggcaggagccagcagcggcggcagtggagagaatggtcgggtggtcagccatgacttccccaagtccatgcaatcgattccttgcatgagccacagttcagggatgcccttgggagccacgggattgtaactggagcagatggagaccccttggggagcaggctcgggctccccagccccatcccaaacccttcagtgccaaaaacaacaacaaaatgaaacgcaaccaccaccaaccactgcgaccacaagaaggatgattcaacaggttttcctgaagaattgaaaaaccattttgctgtcccttttccttttttgatgttctttcacccttttctgtttgctaagtgaggatgaaaaaataacactgtactgcaataaggggagagtaaccctgtctaatgaaacctgtgtctctgagagtagagtcactggaacactaatgaggaaactgcactgttttattttaattcagttgttagtgtgtcttagtgtgtgcaattttttttcttactaatatccatggtttgcaggttctgttaggccctttccttctccttacttcttatccccaactccctacccacccctcttcagttttcagattggagattcaagatttgttccactttacaagcaagaggaaaaaaaagcaaccttcaaactaattctccatgggggctctccatgttaccctccactccttggcccaaacctctgatggagatagacattgttggagaagtgggctgccttccccaagtggggcactgcttaagcacttattcagtggagaacacaggtgaaaagcaactcaggatgagggtggtggagagggcaggggcagatgtgcagtcagagaaggactcctgaagttactgctgctcagaaaaacagttcctttaatgtggaagagccatttcataggtcataggtggtatggtatatttcttcagagtcaaccttggccctgagaagtatgtcctcctggtgtgctcaggctcaacggcagtctggtggctgaaggcacttggcctcctaaaccaagcagaattttgggaagagataacagccagggagatattgcccatgattctcactttttctttgcctggcatctaagcaggaacccattgtggagtagactctcttcttctatggagcctctgacatggggagcaatgctaagcaagctaagtgtaaaagaaaagtgacagaataattttggaagaggaagcctcatcaaaagctcacacaaaatagagcttcccatggtgtgccctatcctaggtttaagaaaacacgtatgaagtttatgctgatgcaaagaacttgggtttttatgttaatataaagtgttgttttagcatgtggccagatgatgctctgtcatctttagaaagtgagataaccaaggaaataattgaaggagtatagggagatggattaagttgataatgacatttagggcaacttaagacctttgatcccaggttctaactcaaagaggctgaccttcccccagctaagatagcatgaggacgttgtattccaatatacgtatgattggggctacaaagctgaactaaagcaagattggtgaagtggcagggtttatagagagaagcccaggctgagttcagcttttgttggaagtgagaatccctgacatatagctttcttggagatcccaactctcattcttggtgcaactggcttccagctctccagcagtcactctcctaggtgcatgattcagtgcgtgccatgtgtcattagcttttactgataaccatattctggcttgttcccttaccccctacttctatccaattttctctgctaggggttatcattagcaattgacatgctaaaggttttggagcccacctaggggtaggtgcagctttattggcttttctgtggattctctcagtggacccacaccatctctatgtctctccactctcctgccttcagccatagcaaagaatccttccaaaatcaaactcttcacttttttgactcaagtgttgttgttcagtctctcgcgtgtcaatgtggtcatggttcatgaaaccggaccctcaagatggatgattgcttttaactactgccagctgatgtctctcagcccctgccctcatacaagatttttctcagccttcagcctaccactgcagaatccgatgtgacccaccattagggagtctgcatcttggaagagttggaaataaccctttaacatcaacatgcttcaaagactttttgcctttggcctagtaagatgcctctccagctactgagcccacaagtaacatgagcggataaaaagagacttgtttgtgctagaaatgagggtctatgctatgagggggtccaagactctggcgaaatgtgctttttcatcaatggagaaatgaaaggaaaacacaagcaagaaaaaagttaacttgtattatgtatttttactacacttttcttaaaaatagagcattgggaaaactctgaaagagactgacatttttctcaacaggaatccatacttaacagttctggctttcattaaattttgctctttggtacctgggccttttatttaacatctatatttgttttaactctcttggcagatgtgtgaaaggattcttgcttgatcaaacactaagtatttttttggttcttgtttttctttcaaatagccaggtttttttcttttggtatttgcataaaatgaaaatatcaccgaatattaaatcactgtggatccatta

SEQ ID NO: 594 - DNA, 5584 bp, Homo sapiens
  source 1..5584: mol_type = genomic DNA
agttaatctggctgtcagttggtgttaacgctgcagtttaagtgttcggattccaagggaaacagacaaacctcacgaaaggaaggaagcaagcaagcaaggaaggaactgcaggaggaaaagaacaggcagaacagcgagaagaataaagggaaagggggggaaacaccaaatctatgattggacctgggcttctttttcgccaatgcaaaaaggaatatgcagcacatttttgccttcttctgcaccggtttcctaggcgcggtagtaggtgccaatttccccaacaatatccagatcgggggattatttccaaaccagcagtcacaggaacatgctgcttttagatttgctttgtcgcaactcacagagcccccgaagctgctcccccagattgatattgtgaacatcagcgacagctttgagatgacctatagattctgttcccagttctccaaaggagtctatgccatctttgggttttatgaacgtaggactgtcaacatgctgacctccttttgtggggccctccacgtctgcttcattacgccgagctttcccgttgatacatccaatcagtttgtccttcagctgcgccctgaactgcaggatgccctcatcagcatcattgaccattacaagtggcagaaatttgtctacatttatgatgccgaccggggcttatccgtcctgcagaaagtcctggatacagctgctgagaagaactggcaggtgacagcagtcaacattttgacaaccacagaggagggataccggatgctctttcaggacctggagaagaaaaaggagcggctggtggtggtggactgtgaatcagaacgcctcaatgctatcttgggccagattataaagctagagaagaatggcatcggctaccactacattcttgcaaatctgggcttcatggacattgacttaaacaaattcaaggagagtggcgccaatgtgacaggtttccagctggtgaactacacagacactattccggccaagatcatgcagcagtggaagaatagtgatgctcgagaccacacacgggtggactggaagagacccaagtacacctctgcgctcacctacgatggggtgaaggtgatggctgaggctttccagagcctgcggaggcagagaattgatatatctcgccgggggaatgctggggattgtctggctaacccagctgttccctggggccaagggatcgacatccagagagctctgcagcaggtgcgatttgaaggtttaacaggaaacgtgcagtttaatgagaaaggacgccggaccaactacacgctccacgtgattgaaatgaaacatgacggcatccgaaagattggttactggaatgaagatgataagtttgtccctgcagccaccgatgcccaagctgggggcgataattcaagtgttcagaacagaacatacatcgtcacaacaatcctagaagatccttatgtgatgctcaagaagaacgccaatcagtttgagggcaatgaccgttacgagggctactgtgtagagctggcggcagagattgccaagcacgtgggctactcctaccgtctggagattgtcagtgatggaaaatacggagcccgagaccctgacacgaaggcctggaatggcatggtgggagagctggtctatggaagagcagatgtggctgtggctcccttaactatcactttggtccgggaagaagttatagatttctccaaaccatttatgagtttggggatctccatcatgattaaaaaaccacagaaatccaagccgggtgtcttctccttccttgatcctttggcttatgagatttggatgtgcattgtttttgcctacattggagtgagtgttgtcctcttcctggtcagccgcttcagtccctatgaatggcacagtgaagagtttgaggaaggacgggaccagacaaccagtgaccagtccaatgagtttgggatattcaacagtttgtggttctccctgggagccttcatgcagcaaggatgtgacatttctcccaggtccctgtctggtcgcatcgttggtggcgtctggtggttcttcaccttaatcatcatctcctcatatacagccaatctggccgccttcctgaccgtggagaggatggtgtctcccattgagagtgcagaggacctagcgaagcagacagaaattgcctacgggacgctggaagcaggatctactaaggagttcttcaggaggtctaaaattgctgtgtttgagaagatgtggacatacatgaagtcagcagagccatcagtttttgtgcggaccacagaggaggggatgattcgagtgaggaaatccaaaggcaaatatgcctacctcctggagtccaccatgaatgagtacattgagcagcggaaaccctgtgacaccatgaaggtgggaggtaacttggattccaaaggctatggcattgcaacacccaaggggtctgccctgagaggtcccgtaaacctagcggttttgaaactcagtgagcaaggcgtcttagacaagctgaaaagcaaatggtggtacgataaaggggaatgtggaagcaaggactccggaagtaaggacaagacaagcgctctgagcctcagcaatgtggcaggcgtgttctacatcctgatcggaggacttggactagccatgctggttgccttaatcgagttctgctacaaatcccgtagtgaatccaagcggatgaagggtttttgtttgatcccacagcaatccatcaacgaagccatacggacatcgaccctcccccgcaacagcggggcaggagccagcagcggcggcagtggagagaatggtcgggtggtcagccatgacttccccaagtccatgcaatcgattccttgcatgagccacagttcagggatgcccttgggagccacgggattgtaactggagcagatggagaccccttggggagcaggctcgggctccccagccccatcccaaacccttcagtgccaaaaacaacaacaaaatgaaacgcaaccaccaccaaccactgcgaccacaagaaggatgattcaacaggttttcctgaagaattgaaaaaccattttgctgtcccttttccttttttgatgttctttcacccttttctgtttgctaagtgaggatgaaaaaataacactgtactgcaataaggggagagtaaccctgtctaatgaaacctgtgtctctgagagtagagtcactggaacactaatgaggaaactgcactgttttattttaattcagttgttagtgtgtcttagtgtgtgcaattttttttcttactaatatccatggtttgcaggttctgttaggccctttccttctccttacttcttatccccaactccctacccacccctcttcagttttcagattggagattcaagatttgttccactttacaagcaagaggaaaaaaaagcaaccttcaaactaattctccatgggggctctccatgttaccctccactccttggcccaaacctctgatggagatagacattgttggagaagtgggctgccttccccaagtggggcactgcttaagcacttattcagtggagaacacaggtgaaaagcaactcaggatgagggtggtggagagggcaggggcagatgtgcagtcagagaaggactcctgaagttactgctgctcagaaaaacagttcctttaatgtggaagagccatttcataggtcataggtggtatggtatatttcttcagagtcaaccttggccctgagaagtatgtcctcctggtgtgctcaggctcaacggcagtctggtggctgaaggcacttggcctcctaaaccaagcagaattttgggaagagataacagccagggagatattgcccatgattctcactttttctttgcctggcatctaagcaggaacccattgtggagtagactctcttcttctatggagcctctgacatggggagcaatgctaagcaagctaagtgtaaaagaaaagtgacagaataattttggaagaggaagcctcatcaaaagctcacacaaaatagagcttcccatggtgtgccctatcctaggtttaagaaaacacgtatgaagtttatgctgatgcaaagaacttgggtttttatgttaatataaagtgttgttttagcatgtggccagatgatgctctgtcatctttagaaagtgagataaccaaggaaataattgaaggagtatagggagatggattaagttgataatgacatttagggcaacttaagacctttgatcccaggttctaactcaaagaggctgaccttcccccagctaagatagcatgaggacgttgtattccaatatacgtatgattggggctacaaagctgaactaaagcaagattggtgaagtggcagggtttatagagagaagcccaggctgagttcagcttttgttggaagtgagaatccctgacatatagctttcttggagatcccaactctcattcttggtgcaactggcttccagctctccagcagtcactctcctaggtgcatgattcagtgcgtgccatgtgtcattagcttttactgataaccatattctggcttgttcccttaccccctacttctatccaattttctctgctaggggttatcattagcaattgacatgctaaaggttttggagcccacctaggggtaggtgcagctttattggcttttctgtggattctctcagtggacccacaccatctctatgtctctccactctcctgccttcagccatagcaaagaatccttccaaaatcaaactcttcacttttttgactcaagtgttgttgttcagtctctcgcgtgtcaatgtggtcatggttcatgaaaccggaccctcaagatggatgattgcttttaactactgccagctgatgtctctcagcccctgccctcatacaagatttttctcagccttcagcctaccactgcagaatccgatgtgacccaccattagggagtctgcatcttggaagagttggaaataaccctttaacatcaacatgcttcaaagactttttgcctttggcctagtaagatgcctctccagctactgagcccacaagtaacatgagcggataaaaagagacttgtttgtgctagaaatgagggtctatgctatgagggggtccaagactctggcgaaatgtgctttttcatcaatggagaaatgaaaggaaaacacaagcaagaaaaaagttaacttgtattatgtatttttactacacttttcttaaaaatagagcattgggaaaactctgaaagagactgacatttttctcaacaggaatccatacttaacagttctggctttcattaaattttgctctttggtacctgggccttttatttaacatctatatttgttttaactctcttggcagatgtgtgaaaggattcttgcttgatcaaacactaagtatttttttggttcttgtttttctttcaaatagccaggtttttttcttttggtatttgcataaaatgaaaatatcaccgaatattaaatcactgtggatccatta

SEQ ID NO: 595 - DNA, 5416 bp, Homo sapiens
  source 1..5416: mol_type = genomic DNA
agttaatctggctgtcagttggtgttaacgctgcagtttaagtgttcggattccaagggaaacagacaaacctcacgaaaggaaggaagcaagcaagcaaggaaggaactgcaggaggaaaagaacaggcagaacagcgagaagaataaagggaaagggggggaaacaccaaatctatgattggacctgggcttctttttcgccaatgcaaaaaggaatatgcagcacatttttgccttcttctgcaccggtttcctaggcgcggtagtaggtgccaatttccccaacaatatccagatcgggggattatttccaaaccagcagtcacaggaacatgctgcttttagatttgctttgtcgcaactcacagagcccccgaagctgctcccccagattgatattgtgaacatcagcgacagctttgagatgacctatagattctgttcccagttctccaaaggagtctatgccatctttgggttttatgaacgtaggactgtcaacatgctgacctccttttgtggggccctccacgtctgcttcattacgccgagctttcccgttgatacatccaatcagtttgtccttcagctgcgccctgaactgcaggatgccctcatcagcatcattgaccattacaagtggcagaaatttgtctacatttatgatgccgaccggggcttatccgtcctgcagaaagtcctggatacagctgctgagaagaactggcaggtgacagcagtcaacattttgacaaccacagaggagggataccggatgctctttcaggacctggagaagaaaaaggagcggctggtggtggtggactgtgaatcagaacgcctcaatgctatcttgggccagattataaagctagagaagaatggcatcggctaccactacattcttgcaaatctgggcttcatggacattgacttaaacaaattcaaggagagtggcgccaatgtgacaggtttccagctggtgaactacacagacactattccggccaagatcatgcagcagtggaagaatagtgatgctcgagaccacacacgggtggactggaagagacccaaggtgcgatttgaaggtttaacaggaaacgtgcagtttaatgagaaaggacgccggaccaactacacgctccacgtgattgaaatgaaacatgacggcatccgaaagattggttactggaatgaagatgataagtttgtccctgcagccaccgatgcccaagctgggggcgataattcaagtgttcagaacagaacatacatcgtcacaacaatcctagaagatccttatgtgatgctcaagaagaacgccaatcagtttgagggcaatgaccgttacgagggctactgtgtagagctggcggcagagattgccaagcacgtgggctactcctaccgtctggagattgtcagtgatggaaaatacggagcccgagaccctgacacgaaggcctggaatggcatggtgggagagctggtctatggaagagcagatgtggctgtggctcccttaactatcactttggtccgggaagaagttatagatttctccaaaccatttatgagtttggggatctccatcatgattaaaaaaccacagaaatccaagccgggtgtcttctccttccttgatcctttggcttatgagatttggatgtgcattgtttttgcctacattggagtgagtgttgtcctcttcctggtcagccgcttcagtccctatgaatggcacagtgaagagtttgaggaaggacgggaccagacaaccagtgaccagtccaatgagtttgggatattcaacagtttgtggttctccctgggagccttcatgcagcaaggatgtgacatttctcccaggtccctgtctggtcgcatcgttggtggcgtctggtggttcttcaccttaatcatcatctcctcatatacagccaatctggccgccttcctgaccgtggagaggatggtgtctcccattgagagtgcagaggacctagcgaagcagacagaaattgcctacgggacgctggaagcaggatctactaaggagttcttcaggaggtctaaaattgctgtgtttgagaagatgtggacatacatgaagtcagcagagccatcagtttttgtgcggaccacagaggaggggatgattcgagtgaggaaatccaaaggcaaatatgcctacctcctggagtccaccatgaatgagtacattgagcagcggaaaccctgtgacaccatgaaggtgggaggtaacttggattccaaaggctatggcattgcaacacccaaggggtctgccctgagaaatccagtaaacctggcagtgttaaaactgaacgagcaggggcttttggacaaattgaaaaacaaatggtggtacgacaagggcgagtgcggcagcgggggaggtgattccaaggacaagacaagcgctctgagcctcagcaatgtggcaggcgtgttctacatcctgatcggaggacttggactagccatgctggttgccttaatcgagttctgctacaaatcccgtagtgaatccaagcggatgaagggtttttgtttgatcccacagcaatccatcaacgaagccatacggacatcgaccctcccccgcaacagcggggcaggagccagcagcggcggcagtggagagaatggtcgggtggtcagccatgacttccccaagtccatgcaatcgattccttgcatgagccacagttcagggatgcccttgggagccacgggattgtaactggagcagatggagaccccttggggagcaggctcgggctccccagccccatcccaaacccttcagtgccaaaaacaacaacaaaatgaaacgcaaccaccaccaaccactgcgaccacaagaaggatgattcaacaggttttcctgaagaattgaaaaaccattttgctgtcccttttccttttttgatgttctttcacccttttctgtttgctaagtgaggatgaaaaaataacactgtactgcaataaggggagagtaaccctgtctaatgaaacctgtgtctctgagagtagagtcactggaacactaatgaggaaactgcactgttttattttaattcagttgttagtgtgtcttagtgtgtgcaattttttttcttactaatatccatggtttgcaggttctgttaggccctttccttctccttacttcttatccccaactccctacccacccctcttcagttttcagattggagattcaagatttgttccactttacaagcaagaggaaaaaaaagcaaccttcaaactaattctccatgggggctctccatgttaccctccactccttggcccaaacctctgatggagatagacattgttggagaagtgggctgccttccccaagtggggcactgcttaagcacttattcagtggagaacacaggtgaaaagcaactcaggatgagggtggtggagagggcaggggcagatgtgcagtcagagaaggactcctgaagttactgctgctcagaaaaacagttcctttaatgtggaagagccatttcataggtcataggtggtatggtatatttcttcagagtcaaccttggccctgagaagtatgtcctcctggtgtgctcaggctcaacggcagtctggtggctgaaggcacttggcctcctaaaccaagcagaattttgggaagagataacagccagggagatattgcccatgattctcactttttctttgcctggcatctaagcaggaacccattgtggagtagactctcttcttctatggagcctctgacatggggagcaatgctaagcaagctaagtgtaaaagaaaagtgacagaataattttggaagaggaagcctcatcaaaagctcacacaaaatagagcttcccatggtgtgccctatcctaggtttaagaaaacacgtatgaagtttatgctgatgcaaagaacttgggtttttatgttaatataaagtgttgttttagcatgtggccagatgatgctctgtcatctttagaaagtgagataaccaaggaaataattgaaggagtatagggagatggattaagttgataatgacatttagggcaacttaagacctttgatcccaggttctaactcaaagaggctgaccttcccccagctaagatagcatgaggacgttgtattccaatatacgtatgattggggctacaaagctgaactaaagcaagattggtgaagtggcagggtttatagagagaagcccaggctgagttcagcttttgttggaagtgagaatccctgacatatagctttcttggagatcccaactctcattcttggtgcaactggcttccagctctccagcagtcactctcctaggtgcatgattcagtgcgtgccatgtgtcattagcttttactgataaccatattctggcttgttcccttaccccctacttctatccaattttctctgctaggggttatcattagcaattgacatgctaaaggttttggagcccacctaggggtaggtgcagctttattggcttttctgtggattctctcagtggacccacaccatctctatgtctctccactctcctgccttcagccatagcaaagaatccttccaaaatcaaactcttcacttttttgactcaagtgttgttgttcagtctctcgcgtgtcaatgtggtcatggttcatgaaaccggaccctcaagatggatgattgcttttaactactgccagctgatgtctctcagcccctgccctcatacaagatttttctcagccttcagcctaccactgcagaatccgatgtgacccaccattagggagtctgcatcttggaagagttggaaataaccctttaacatcaacatgcttcaaagactttttgcctttggcctagtaagatgcctctccagctactgagcccacaagtaacatgagcggataaaaagagacttgtttgtgctagaaatgagggtctatgctatgagggggtccaagactctggcgaaatgtgctttttcatcaatggagaaatgaaaggaaaacacaagcaagaaaaaagttaacttgtattatgtatttttactacacttttcttaaaaatagagcattgggaaaactctgaaagagactgacatttttctcaacaggaatccatacttaacagttctggctttcattaaattttgctctttggtacctgggccttttatttaacatctatatttgttttaactctcttggcagatgtgtgaaaggattcttgcttgatcaaacactaagtatttttttggttcttgtttttctttcaaatagccaggtttttttcttttggtatttgcataaaatgaaaatatcaccgaatattaaatcactgtggatccatta

SEQ ID NO: 596 - DNA, 5344 bp, Homo sapiens
  source 1..5344: mol_type = genomic DNA
agttaatctggctgtcagttggtgttaacgctgcagtttaagtgttcggattccaagggaaacagacaaacctcacgaaaggaaggaagcaagcaagcaaggaaggaactgcaggaggaaaagaacaggcagaacagcgagaagaataaagggaaagggggggaaacaccaaatctatgattggacctgggcttctttttcgccaatgcaaaaaggaatatgcagcacatttttgccttcttctgcaccggtttcctaggcgcggtagtaggtgccaatttccccaacaatatccagatcgggggattatttccaaaccagcagtcacaggaacatgctgcttttagatttgctttgtcgcaactcacagagcccccgaagctgctcccccagattgatattgtgaacatcagcgacagctttgagatgacctatagatgcttatccgtcctgcagaaagtcctggatacagctgctgagaagaactggcaggtgacagcagtcaacattttgacaaccacagaggagggataccggatgctctttcaggacctggagaagaaaaaggagcggctggtggtggtggactgtgaatcagaacgcctcaatgctatcttgggccagattataaagctagagaagaatggcatcggctaccactacattcttgcaaatctgggcttcatggacattgacttaaacaaattcaaggagagtggcgccaatgtgacaggtttccagctggtgaactacacagacactattccggccaagatcatgcagcagtggaagaatagtgatgctcgagaccacacacgggtggactggaagagacccaagtacacctctgcgctcacctacgatggggtgaaggtgatggctgaggctttccagagcctgcggaggcagagaattgatatatctcgccgggggaatgctggggattgtctggctaacccagctgttccctggggccaagggatcgacatccagagagctctgcagcaggtgcgatttgaaggtttaacaggaaacgtgcagtttaatgagaaaggacgccggaccaactacacgctccacgtgattgaaatgaaacatgacggcatccgaaagattggttactggaatgaagatgataagtttgtccctgcagccaccgatgcccaagctgggggcgataattcaagtgttcagaacagaacatacatcgtcacaacaatcctagaagatccttatgtgatgctcaagaagaacgccaatcagtttgagggcaatgaccgttacgagggctactgtgtagagctggcggcagagattgccaagcacgtgggctactcctaccgtctggagattgtcagtgatggaaaatacggagcccgagaccctgacacgaaggcctggaatggcatggtgggagagctggtctatggaagagcagatgtggctgtggctcccttaactatcactttggtccgggaagaagttatagatttctccaaaccatttatgagtttggggatctccatcatgattaaaaaaccacagaaatccaagccgggtgtcttctccttccttgatcctttggcttatgagatttggatgtgcattgtttttgcctacattggagtgagtgttgtcctcttcctggtcagccgcttcagtccctatgaatggcacagtgaagagtttgaggaaggacgggaccagacaaccagtgaccagtccaatgagtttgggatattcaacagtttgtggttctccctgggagccttcatgcagcaaggatgtgacatttctcccaggtccctgtctggtcgcatcgttggtggcgtctggtggttcttcaccttaatcatcatctcctcatatacagccaatctggccgccttcctgaccgtggagaggatggtgtctcccattgagagtgcagaggacctagcgaagcagacagaaattgcctacgggacgctggaagcaggatctactaaggagttcttcaggaggtctaaaattgctgtgtttgagaagatgtggacatacatgaagtcagcagagccatcagtttttgtgcggaccacagaggaggggatgattcgagtgaggaaatccaaaggcaaatatgcctacctcctggagtccaccatgaatgagtacattgagcagcggaaaccctgtgacaccatgaaggtgggaggtaacttggattccaaaggctatggcattgcaacacccaaggggtctgccctgagaaatccagtaaacctggcagtgttaaaactgaacgagcaggggcttttggacaaattgaaaaacaaatggtggtacgacaagggcgagtgcggcagcgggggaggtgattccaaggacaagacaagcgctctgagcctcagcaatgtggcaggcgtgttctacatcctgatcggaggacttggactagccatgctggttgccttaatcgagttctgctacaaatcccgtagtgaatccaagcggatgaagggtttttgtttgatcccacagcaatccatcaacgaagccatacggacatcgaccctcccccgcaacagcggggcaggagccagcagcggcggcagtggagagaatggtcgggtggtcagccatgacttccccaagtccatgcaatcgattccttgcatgagccacagttcagggatgcccttgggagccacgggattgtaactggagcagatggagaccccttggggagcaggctcgggctccccagccccatcccaaacccttcagtgccaaaaacaacaacaaaatgaaacgcaaccaccaccaaccactgcgaccacaagaaggatgattcaacaggttttcctgaagaattgaaaaaccattttgctgtcccttttccttttttgatgttctttcacccttttctgtttgctaagtgaggatgaaaaaataacactgtactgcaataaggggagagtaaccctgtctaatgaaacctgtgtctctgagagtagagtcactggaacactaatgaggaaactgcactgttttattttaattcagttgttagtgtgtcttagtgtgtgcaattttttttcttactaatatccatggtttgcaggttctgttaggccctttccttctccttacttcttatccccaactccctacccacccctcttcagttttcagattggagattcaagatttgttccactttacaagcaagaggaaaaaaaagcaaccttcaaactaattctccatgggggctctccatgttaccctccactccttggcccaaacctctgatggagatagacattgttggagaagtgggctgccttccccaagtggggcactgcttaagcacttattcagtggagaacacaggtgaaaagcaactcaggatgagggtggtggagagggcaggggcagatgtgcagtcagagaaggactcctgaagttactgctgctcagaaaaacagttcctttaatgtggaagagccatttcataggtcataggtggtatggtatatttcttcagagtcaaccttggccctgagaagtatgtcctcctggtgtgctcaggctcaacggcagtctggtggctgaaggcacttggcctcctaaaccaagcagaattttgggaagagataacagccagggagatattgcccatgattctcactttttctttgcctggcatctaagcaggaacccattgtggagtagactctcttcttctatggagcctctgacatggggagcaatgctaagcaagctaagtgtaaaagaaaagtgacagaataattttggaagaggaagcctcatcaaaagctcacacaaaatagagcttcccatggtgtgccctatcctaggtttaagaaaacacgtatgaagtttatgctgatgcaaagaacttgggtttttatgttaatataaagtgttgttttagcatgtggccagatgatgctctgtcatctttagaaagtgagataaccaaggaaataattgaaggagtatagggagatggattaagttgataatgacatttagggcaacttaagacctttgatcccaggttctaactcaaagaggctgaccttcccccagctaagatagcatgaggacgttgtattccaatatacgtatgattggggctacaaagctgaactaaagcaagattggtgaagtggcagggtttatagagagaagcccaggctgagttcagcttttgttggaagtgagaatccctgacatatagctttcttggagatcccaactctcattcttggtgcaactggcttccagctctccagcagtcactctcctaggtgcatgattcagtgcgtgccatgtgtcattagcttttactgataaccatattctggcttgttcccttaccccctacttctatccaattttctctgctaggggttatcattagcaattgacatgctaaaggttttggagcccacctaggggtaggtgcagctttattggcttttctgtggattctctcagtggacccacaccatctctatgtctctccactctcctgccttcagccatagcaaagaatccttccaaaatcaaactcttcacttttttgactcaagtgttgttgttcagtctctcgcgtgtcaatgtggtcatggttcatgaaaccggaccctcaagatggatgattgcttttaactactgccagctgatgtctctcagcccctgccctcatacaagatttttctcagccttcagcctaccactgcagaatccgatgtgacccaccattagggagtctgcatcttggaagagttggaaataaccctttaacatcaacatgcttcaaagactttttgcctttggcctagtaagatgcctctccagctactgagcccacaagtaacatgagcggataaaaagagacttgtttgtgctagaaatgagggtctatgctatgagggggtccaagactctggcgaaatgtgctttttcatcaatggagaaatgaaaggaaaacacaagcaagaaaaaagttaacttgtattatgtatttttactacacttttcttaaaaatagagcattgggaaaactctgaaagagactgacatttttctcaacaggaatccatacttaacagttctggctttcattaaattttgctctttggtacctgggccttttatttaacatctatatttgttttaactctcttggcagatgtgtgaaaggattcttgcttgatcaaacactaagtatttttttggttcttgtttttctttcaaatagccaggtttttttcttttggtatttgcataaaatgaaaatatcaccgaatattaaatcactgtggatccatta

SEQ ID NO: 597 - DNA, 5336 bp, Homo sapiens
  source 1..5336: mol_type = genomic DNA
attgcttggtagatggtgcttgattccatttttaatggggattatttccaaaccagcagtcacaggaacatgctgcttttagatttgctttgtcgcaactcacagagcccccgaagctgctcccccagattgatattgtgaacatcagcgacagctttgagatgacctatagattctgttcccagttctccaaaggagtctatgccatctttgggttttatgaacgtaggactgtcaacatgctgacctccttttgtggggccctccacgtctgcttcattacgccgagctttcccgttgatacatccaatcagtttgtccttcagctgcgccctgaactgcaggatgccctcatcagcatcattgaccattacaagtggcagaaatttgtctacatttatgatgccgaccggggcttatccgtcctgcagaaagtcctggatacagctgctgagaagaactggcaggtgacagcagtcaacattttgacaaccacagaggagggataccggatgctctttcaggacctggagaagaaaaaggagcggctggtggtggtggactgtgaatcagaacgcctcaatgctatcttgggccagattataaagctagagaagaatggcatcggctaccactacattcttgcaaatctgggcttcatggacattgacttaaacaaattcaaggagagtggcgccaatgtgacaggtttccagctggtgaactacacagacactattccggccaagatcatgcagcagtggaagaatagtgatgctcgagaccacacacgggtggactggaagagacccaagtacacctctgcgctcacctacgatggggtgaaggtgatggctgaggctttccagagcctgcggaggcagagaattgatatatctcgccgggggaatgctggggattgtctggctaacccagctgttccctggggccaagggatcgacatccagagagctctgcagcaggtgcgatttgaaggtttaacaggaaacgtgcagtttaatgagaaaggacgccggaccaactacacgctccacgtgattgaaatgaaacatgacggcatccgaaagattggttactggaatgaagatgataagtttgtccctgcagccaccgatgcccaagctgggggcgataattcaagtgttcagaacagaacatacatcgtcacaacaatcctagaagatccttatgtgatgctcaagaagaacgccaatcagtttgagggcaatgaccgttacgagggctactgtgtagagctggcggcagagattgccaagcacgtgggctactcctaccgtctggagattgtcagtgatggaaaatacggagcccgagaccctgacacgaaggcctggaatggcatggtgggagagctggtctatggaagagcagatgtggctgtggctcccttaactatcactttggtccgggaagaagttatagatttctccaaaccatttatgagtttggggatctccatcatgattaaaaaaccacagaaatccaagccgggtgtcttctccttccttgatcctttggcttatgagatttggatgtgcattgtttttgcctacattggagtgagtgttgtcctcttcctggtcagccgcttcagtccctatgaatggcacagtgaagagtttgaggaaggacgggaccagacaaccagtgaccagtccaatgagtttgggatattcaacagtttgtggttctccctgggagccttcatgcagcaaggatgtgacatttctcccaggtccctgtctggtcgcatcgttggtggcgtctggtggttcttcaccttaatcatcatctcctcatatacagccaatctggccgccttcctgaccgtggagaggatggtgtctcccattgagagtgcagaggacctagcgaagcagacagaaattgcctacgggacgctggaagcaggatctactaaggagttcttcaggaggtctaaaattgctgtgtttgagaagatgtggacatacatgaagtcagcagagccatcagtttttgtgcggaccacagaggaggggatgattcgagtgaggaaatccaaaggcaaatatgcctacctcctggagtccaccatgaatgagtacattgagcagcggaaaccctgtgacaccatgaaggtgggaggtaacttggattccaaaggctatggcattgcaacacccaaggggtctgccctgagaaatccagtaaacctggcagtgttaaaactgaacgagcaggggcttttggacaaattgaaaaacaaatggtggtacgacaagggcgagtgcggcagcgggggaggtgattccaaggacaagacaagcgctctgagcctcagcaatgtggcaggcgtgttctacatcctgatcggaggacttggactagccatgctggttgccttaatcgagttctgctacaaatcccgtagtgaatccaagcggatgaagggtttttgtttgatcccacagcaatccatcaacgaagccatacggacatcgaccctcccccgcaacagcggggcaggagccagcagcggcggcagtggagagaatggtcgggtggtcagccatgacttccccaagtccatgcaatcgattccttgcatgagccacagttcagggatgcccttgggagccacgggattgtaactggagcagatggagaccccttggggagcaggctcgggctccccagccccatcccaaacccttcagtgccaaaaacaacaacaaaatgaaacgcaaccaccaccaaccactgcgaccacaagaaggatgattcaacaggttttcctgaagaattgaaaaaccattttgctgtcccttttccttttttgatgttctttcacccttttctgtttgctaagtgaggatgaaaaaataacactgtactgcaataaggggagagtaaccctgtctaatgaaacctgtgtctctgagagtagagtcactggaacactaatgaggaaactgcactgttttattttaattcagttgttagtgtgtcttagtgtgtgcaattttttttcttactaatatccatggtttgcaggttctgttaggccctttccttctccttacttcttatccccaactccctacccacccctcttcagttttcagattggagattcaagatttgttccactttacaagcaagaggaaaaaaaagcaaccttcaaactaattctccatgggggctctccatgttaccctccactccttggcccaaacctctgatggagatagacattgttggagaagtgggctgccttccccaagtggggcactgcttaagcacttattcagtggagaacacaggtgaaaagcaactcaggatgagggtggtggagagggcaggggcagatgtgcagtcagagaaggactcctgaagttactgctgctcagaaaaacagttcctttaatgtggaagagccatttcataggtcataggtggtatggtatatttcttcagagtcaaccttggccctgagaagtatgtcctcctggtgtgctcaggctcaacggcagtctggtggctgaaggcacttggcctcctaaaccaagcagaattttgggaagagataacagccagggagatattgcccatgattctcactttttctttgcctggcatctaagcaggaacccattgtggagtagactctcttcttctatggagcctctgacatggggagcaatgctaagcaagctaagtgtaaaagaaaagtgacagaataattttggaagaggaagcctcatcaaaagctcacacaaaatagagcttcccatggtgtgccctatcctaggtttaagaaaacacgtatgaagtttatgctgatgcaaagaacttgggtttttatgttaatataaagtgttgttttagcatgtggccagatgatgctctgtcatctttagaaagtgagataaccaaggaaataattgaaggagtatagggagatggattaagttgataatgacatttagggcaacttaagacctttgatcccaggttctaactcaaagaggctgaccttcccccagctaagatagcatgaggacgttgtattccaatatacgtatgattggggctacaaagctgaactaaagcaagattggtgaagtggcagggtttatagagagaagcccaggctgagttcagcttttgttggaagtgagaatccctgacatatagctttcttggagatcccaactctcattcttggtgcaactggcttccagctctccagcagtcactctcctaggtgcatgattcagtgcgtgccatgtgtcattagcttttactgataaccatattctggcttgttcccttaccccctacttctatccaattttctctgctaggggttatcattagcaattgacatgctaaaggttttggagcccacctaggggtaggtgcagctttattggcttttctgtggattctctcagtggacccacaccatctctatgtctctccactctcctgccttcagccatagcaaagaatccttccaaaatcaaactcttcacttttttgactcaagtgttgttgttcagtctctcgcgtgtcaatgtggtcatggttcatgaaaccggaccctcaagatggatgattgcttttaactactgccagctgatgtctctcagcccctgccctcatacaagatttttctcagccttcagcctaccactgcagaatccgatgtgacccaccattagggagtctgcatcttggaagagttggaaataaccctttaacatcaacatgcttcaaagactttttgcctttggcctagtaagatgcctctccagctactgagcccacaagtaacatgagcggataaaaagagacttgtttgtgctagaaatgagggtctatgctatgagggggtccaagactctggcgaaatgtgctttttcatcaatggagaaatgaaaggaaaacacaagcaagaaaaaagttaacttgtattatgtatttttactacacttttcttaaaaatagagcattgggaaaactctgaaagagactgacatttttctcaacaggaatccatacttaacagttctggctttcattaaattttgctctttggtacctgggccttttatttaacatctatatttgttttaactctcttggcagatgtgtgaaaggattcttgcttgatcaaacactaagtatttttttggttcttgtttttctttcaaatagccaggtttttttcttttggtatttgcataaaatgaaaatatcaccgaatattaaatcactgtggatccattaaaaaaaaaaaaaaaaaa

SEQ ID NO: 598 - DNA, 5422 bp, Homo sapiens
  source 1..5422: mol_type = genomic DNA
gtgcaattgatattttgtcgggcatacatgtgctgcagtacccatctctttcagcctctccagctagctggcggcttggagtggccatggagtaacttgctttgtttcctgacacctgttaagctacatcctgaagtgtggggattatttccaaaccagcagtcacaggaacatgctgcttttagatttgctttgtcgcaactcacagagcccccgaagctgctcccccagattgatattgtgaacatcagcgacagctttgagatgacctatagattctgttcccagttctccaaaggagtctatgccatctttgggttttatgaacgtaggactgtcaacatgctgacctccttttgtggggccctccacgtctgcttcattacgccgagctttcccgttgatacatccaatcagtttgtccttcagctgcgccctgaactgcaggatgccctcatcagcatcattgaccattacaagtggcagaaatttgtctacatttatgatgccgaccggggcttatccgtcctgcagaaagtcctggatacagctgctgagaagaactggcaggtgacagcagtcaacattttgacaaccacagaggagggataccggatgctctttcaggacctggagaagaaaaaggagcggctggtggtggtggactgtgaatcagaacgcctcaatgctatcttgggccagattataaagctagagaagaatggcatcggctaccactacattcttgcaaatctgggcttcatggacattgacttaaacaaattcaaggagagtggcgccaatgtgacaggtttccagctggtgaactacacagacactattccggccaagatcatgcagcagtggaagaatagtgatgctcgagaccacacacgggtggactggaagagacccaagtacacctctgcgctcacctacgatggggtgaaggtgatggctgaggctttccagagcctgcggaggcagagaattgatatatctcgccgggggaatgctggggattgtctggctaacccagctgttccctggggccaagggatcgacatccagagagctctgcagcaggtgcgatttgaaggtttaacaggaaacgtgcagtttaatgagaaaggacgccggaccaactacacgctccacgtgattgaaatgaaacatgacggcatccgaaagattggttactggaatgaagatgataagtttgtccctgcagccaccgatgcccaagctgggggcgataattcaagtgttcagaacagaacatacatcgtcacaacaatcctagaagatccttatgtgatgctcaagaagaacgccaatcagtttgagggcaatgaccgttacgagggctactgtgtagagctggcggcagagattgccaagcacgtgggctactcctaccgtctggagattgtcagtgatggaaaatacggagcccgagaccctgacacgaaggcctggaatggcatggtgggagagctggtctatggaagagcagatgtggctgtggctcccttaactatcactttggtccgggaagaagttatagatttctccaaaccatttatgagtttggggatctccatcatgattaaaaaaccacagaaatccaagccgggtgtcttctccttccttgatcctttggcttatgagatttggatgtgcattgtttttgcctacattggagtgagtgttgtcctcttcctggtcagccgcttcagtccctatgaatggcacagtgaagagtttgaggaaggacgggaccagacaaccagtgaccagtccaatgagtttgggatattcaacagtttgtggttctccctgggagccttcatgcagcaaggatgtgacatttctcccaggtccctgtctggtcgcatcgttggtggcgtctggtggttcttcaccttaatcatcatctcctcatatacagccaatctggccgccttcctgaccgtggagaggatggtgtctcccattgagagtgcagaggacctagcgaagcagacagaaattgcctacgggacgctggaagcaggatctactaaggagttcttcaggaggtctaaaattgctgtgtttgagaagatgtggacatacatgaagtcagcagagccatcagtttttgtgcggaccacagaggaggggatgattcgagtgaggaaatccaaaggcaaatatgcctacctcctggagtccaccatgaatgagtacattgagcagcggaaaccctgtgacaccatgaaggtgggaggtaacttggattccaaaggctatggcattgcaacacccaaggggtctgccctgagaaatccagtaaacctggcagtgttaaaactgaacgagcaggggcttttggacaaattgaaaaacaaatggtggtacgacaagggcgagtgcggcagcgggggaggtgattccaaggacaagacaagcgctctgagcctcagcaatgtggcaggcgtgttctacatcctgatcggaggacttggactagccatgctggttgccttaatcgagttctgctacaaatcccgtagtgaatccaagcggatgaagggtttttgtttgatcccacagcaatccatcaacgaagccatacggacatcgaccctcccccgcaacagcggggcaggagccagcagcggcggcagtggagagaatggtcgggtggtcagccatgacttccccaagtccatgcaatcgattccttgcatgagccacagttcagggatgcccttgggagccacgggattgtaactggagcagatggagaccccttggggagcaggctcgggctccccagccccatcccaaacccttcagtgccaaaaacaacaacaaaatgaaacgcaaccaccaccaaccactgcgaccacaagaaggatgattcaacaggttttcctgaagaattgaaaaaccattttgctgtcccttttccttttttgatgttctttcacccttttctgtttgctaagtgaggatgaaaaaataacactgtactgcaataaggggagagtaaccctgtctaatgaaacctgtgtctctgagagtagagtcactggaacactaatgaggaaactgcactgttttattttaattcagttgttagtgtgtcttagtgtgtgcaattttttttcttactaatatccatggtttgcaggttctgttaggccctttccttctccttacttcttatccccaactccctacccacccctcttcagttttcagattggagattcaagatttgttccactttacaagcaagaggaaaaaaaagcaaccttcaaactaattctccatgggggctctccatgttaccctccactccttggcccaaacctctgatggagatagacattgttggagaagtgggctgccttccccaagtggggcactgcttaagcacttattcagtggagaacacaggtgaaaagcaactcaggatgagggtggtggagagggcaggggcagatgtgcagtcagagaaggactcctgaagttactgctgctcagaaaaacagttcctttaatgtggaagagccatttcataggtcataggtggtatggtatatttcttcagagtcaaccttggccctgagaagtatgtcctcctggtgtgctcaggctcaacggcagtctggtggctgaaggcacttggcctcctaaaccaagcagaattttgggaagagataacagccagggagatattgcccatgattctcactttttctttgcctggcatctaagcaggaacccattgtggagtagactctcttcttctatggagcctctgacatggggagcaatgctaagcaagctaagtgtaaaagaaaagtgacagaataattttggaagaggaagcctcatcaaaagctcacacaaaatagagcttcccatggtgtgccctatcctaggtttaagaaaacacgtatgaagtttatgctgatgcaaagaacttgggtttttatgttaatataaagtgttgttttagcatgtggccagatgatgctctgtcatctttagaaagtgagataaccaaggaaataattgaaggagtatagggagatggattaagttgataatgacatttagggcaacttaagacctttgatcccaggttctaactcaaagaggctgaccttcccccagctaagatagcatgaggacgttgtattccaatatacgtatgattggggctacaaagctgaactaaagcaagattggtgaagtggcagggtttatagagagaagcccaggctgagttcagcttttgttggaagtgagaatccctgacatatagctttcttggagatcccaactctcattcttggtgcaactggcttccagctctccagcagtcactctcctaggtgcatgattcagtgcgtgccatgtgtcattagcttttactgataaccatattctggcttgttcccttaccccctacttctatccaattttctctgctaggggttatcattagcaattgacatgctaaaggttttggagcccacctaggggtaggtgcagctttattggcttttctgtggattctctcagtggacccacaccatctctatgtctctccactctcctgccttcagccatagcaaagaatccttccaaaatcaaactcttcacttttttgactcaagtgttgttgttcagtctctcgcgtgtcaatgtggtcatggttcatgaaaccggaccctcaagatggatgattgcttttaactactgccagctgatgtctctcagcccctgccctcatacaagatttttctcagccttcagcctaccactgcagaatccgatgtgacccaccattagggagtctgcatcttggaagagttggaaataaccctttaacatcaacatgcttcaaagactttttgcctttggcctagtaagatgcctctccagctactgagcccacaagtaacatgagcggataaaaagagacttgtttgtgctagaaatgagggtctatgctatgagggggtccaagactctggcgaaatgtgctttttcatcaatggagaaatgaaaggaaaacacaagcaagaaaaaagttaacttgtattatgtatttttactacacttttcttaaaaatagagcattgggaaaactctgaaagagactgacatttttctcaacaggaatccatacttaacagttctggctttcattaaattttgctctttggtacctgggccttttatttaacatctatatttgttttaactctcttggcagatgtgtgaaaggattcttgcttgatcaaacactaagtatttttttggttcttgtttttctttcaaatagccaggtttttttcttttggtatttgcataaaatgaaaatatcaccgaatattaaatcactgtggatccatta

SEQ ID NO: 599 - DNA, 5422 bp, Homo sapiens
  source 1..5422: mol_type = genomic DNA
gtgcaattgatattttgtcgggcatacatgtgctgcagtacccatctctttcagcctctccagctagctggcggcttggagtggccatggagtaacttgctttgtttcctgacacctgttaagctacatcctgaagtgtggggattatttccaaaccagcagtcacaggaacatgctgcttttagatttgctttgtcgcaactcacagagcccccgaagctgctcccccagattgatattgtgaacatcagcgacagctttgagatgacctatagattctgttcccagttctccaaaggagtctatgccatctttgggttttatgaacgtaggactgtcaacatgctgacctccttttgtggggccctccacgtctgcttcattacgccgagctttcccgttgatacatccaatcagtttgtccttcagctgcgccctgaactgcaggatgccctcatcagcatcattgaccattacaagtggcagaaatttgtctacatttatgatgccgaccggggcttatccgtcctgcagaaagtcctggatacagctgctgagaagaactggcaggtgacagcagtcaacattttgacaaccacagaggagggataccggatgctctttcaggacctggagaagaaaaaggagcggctggtggtggtggactgtgaatcagaacgcctcaatgctatcttgggccagattataaagctagagaagaatggcatcggctaccactacattcttgcaaatctgggcttcatggacattgacttaaacaaattcaaggagagtggcgccaatgtgacaggtttccagctggtgaactacacagacactattccggccaagatcatgcagcagtggaagaatagtgatgctcgagaccacacacgggtggactggaagagacccaagtacacctctgcgctcacctacgatggggtgaaggtgatggctgaggctttccagagcctgcggaggcagagaattgatatatctcgccgggggaatgctggggattgtctggctaacccagctgttccctggggccaagggatcgacatccagagagctctgcagcaggtgcgatttgaaggtttaacaggaaacgtgcagtttaatgagaaaggacgccggaccaactacacgctccacgtgattgaaatgaaacatgacggcatccgaaagattggttactggaatgaagatgataagtttgtccctgcagccaccgatgcccaagctgggggcgataattcaagtgttcagaacagaacatacatcgtcacaacaatcctagaagatccttatgtgatgctcaagaagaacgccaatcagtttgagggcaatgaccgttacgagggctactgtgtagagctggcggcagagattgccaagcacgtgggctactcctaccgtctggagattgtcagtgatggaaaatacggagcccgagaccctgacacgaaggcctggaatggcatggtgggagagctggtctatggaagagcagatgtggctgtggctcccttaactatcactttggtccgggaagaagttatagatttctccaaaccatttatgagtttggggatctccatcatgattaaaaaaccacagaaatccaagccgggtgtcttctccttccttgatcctttggcttatgagatttggatgtgcattgtttttgcctacattggagtgagtgttgtcctcttcctggtcagccgcttcagtccctatgaatggcacagtgaagagtttgaggaaggacgggaccagacaaccagtgaccagtccaatgagtttgggatattcaacagtttgtggttctccctgggagccttcatgcagcaaggatgtgacatttctcccaggtccctgtctggtcgcatcgttggtggcgtctggtggttcttcaccttaatcatcatctcctcatatacagccaatctggccgccttcctgaccgtggagaggatggtgtctcccattgagagtgcagaggacctagcgaagcagacagaaattgcctacgggacgctggaagcaggatctactaaggagttcttcaggaggtctaaaattgctgtgtttgagaagatgtggacatacatgaagtcagcagagccatcagtttttgtgcggaccacagaggaggggatgattcgagtgaggaaatccaaaggcaaatatgcctacctcctggagtccaccatgaatgagtacattgagcagcggaaaccctgtgacaccatgaaggtgggaggtaacttggattccaaaggctatggcattgcaacacccaaggggtctgccctgagaggtcccgtaaacctagcggttttgaaactcagtgagcaaggcgtcttagacaagctgaaaagcaaatggtggtacgataaaggggaatgtggaagcaaggactccggaagtaaggacaagacaagcgctctgagcctcagcaatgtggcaggcgtgttctacatcctgatcggaggacttggactagccatgctggttgccttaatcgagttctgctacaaatcccgtagtgaatccaagcggatgaagggtttttgtttgatcccacagcaatccatcaacgaagccatacggacatcgaccctcccccgcaacagcggggcaggagccagcagcggcggcagtggagagaatggtcgggtggtcagccatgacttccccaagtccatgcaatcgattccttgcatgagccacagttcagggatgcccttgggagccacgggattgtaactggagcagatggagaccccttggggagcaggctcgggctccccagccccatcccaaacccttcagtgccaaaaacaacaacaaaatgaaacgcaaccaccaccaaccactgcgaccacaagaaggatgattcaacaggttttcctgaagaattgaaaaaccattttgctgtcccttttccttttttgatgttctttcacccttttctgtttgctaagtgaggatgaaaaaataacactgtactgcaataaggggagagtaaccctgtctaatgaaacctgtgtctctgagagtagagtcactggaacactaatgaggaaactgcactgttttattttaattcagttgttagtgtgtcttagtgtgtgcaattttttttcttactaatatccatggtttgcaggttctgttaggccctttccttctccttacttcttatccccaactccctacccacccctcttcagttttcagattggagattcaagatttgttccactttacaagcaagaggaaaaaaaagcaaccttcaaactaattctccatgggggctctccatgttaccctccactccttggcccaaacctctgatggagatagacattgttggagaagtgggctgccttccccaagtggggcactgcttaagcacttattcagtggagaacacaggtgaaaagcaactcaggatgagggtggtggagagggcaggggcagatgtgcagtcagagaaggactcctgaagttactgctgctcagaaaaacagttcctttaatgtggaagagccatttcataggtcataggtggtatggtatatttcttcagagtcaaccttggccctgagaagtatgtcctcctggtgtgctcaggctcaacggcagtctggtggctgaaggcacttggcctcctaaaccaagcagaattttgggaagagataacagccagggagatattgcccatgattctcactttttctttgcctggcatctaagcaggaacccattgtggagtagactctcttcttctatggagcctctgacatggggagcaatgctaagcaagctaagtgtaaaagaaaagtgacagaataattttggaagaggaagcctcatcaaaagctcacacaaaatagagcttcccatggtgtgccctatcctaggtttaagaaaacacgtatgaagtttatgctgatgcaaagaacttgggtttttatgttaatataaagtgttgttttagcatgtggccagatgatgctctgtcatctttagaaagtgagataaccaaggaaataattgaaggagtatagggagatggattaagttgataatgacatttagggcaacttaagacctttgatcccaggttctaactcaaagaggctgaccttcccccagctaagatagcatgaggacgttgtattccaatatacgtatgattggggctacaaagctgaactaaagcaagattggtgaagtggcagggtttatagagagaagcccaggctgagttcagcttttgttggaagtgagaatccctgacatatagctttcttggagatcccaactctcattcttggtgcaactggcttccagctctccagcagtcactctcctaggtgcatgattcagtgcgtgccatgtgtcattagcttttactgataaccatattctggcttgttcccttaccccctacttctatccaattttctctgctaggggttatcattagcaattgacatgctaaaggttttggagcccacctaggggtaggtgcagctttattggcttttctgtggattctctcagtggacccacaccatctctatgtctctccactctcctgccttcagccatagcaaagaatccttccaaaatcaaactcttcacttttttgactcaagtgttgttgttcagtctctcgcgtgtcaatgtggtcatggttcatgaaaccggaccctcaagatggatgattgcttttaactactgccagctgatgtctctcagcccctgccctcatacaagatttttctcagccttcagcctaccactgcagaatccgatgtgacccaccattagggagtctgcatcttggaagagttggaaataaccctttaacatcaacatgcttcaaagactttttgcctttggcctagtaagatgcctctccagctactgagcccacaagtaacatgagcggataaaaagagacttgtttgtgctagaaatgagggtctatgctatgagggggtccaagactctggcgaaatgtgctttttcatcaatggagaaatgaaaggaaaacacaagcaagaaaaaagttaacttgtattatgtatttttactacacttttcttaaaaatagagcattgggaaaactctgaaagagactgacatttttctcaacaggaatccatacttaacagttctggctttcattaaattttgctctttggtacctgggccttttatttaacatctatatttgttttaactctcttggcagatgtgtgaaaggattcttgcttgatcaaacactaagtatttttttggttcttgtttttctttcaaatagccaggtttttttcttttggtatttgcataaaatgaaaatatcaccgaatattaaatcactgtggatccatta

SEQ ID NO: 600 - DNA, 2587 bp, Homo sapiens
  source 1..2587: mol_type = genomic DNA
gtgcaattgatattttgtcgggcatacatgtgctgcagtacccatctctttcagcctctccagctagctggcggcttggagtggccatggagtaacttgctttgtttcctgacacctgttaagctacatcctgaagtgtggggattatttccaaaccagcagtcacaggaacatgctgcttttagatttgctttgtcgcaactcacagagcccccgaagctgctcccccagattgatattgtgaacatcagcgacagctttgagatgacctatagattctgttcccagttctccaaaggagtctatgccatctttgggttttatgaacgtaggactgtcaacatgctgacctccttttgtggggccctccacgtctgcttcattacgccgagctttcccgttgatacatccaatcagtttgtccttcagctgcgccctgaactgcaggatgccctcatcagcatcattgaccattacaagtggcagaaatttgtctacatttatgatgccgaccggggcttatccgtcctgcagaaagtcctggatacagctgctgagaagaactggcaggtgacagcagtcaacattttgacaaccacagaggagggataccggatgctctttcaggacctggagaagaaaaaggagcggctggtggtggtggactgtgaatcagaacgcctcaatgctatcttgggccagattataaagctagagaagaatggcatcggctaccactacattcttgcaaatctgggcttcatggacattgacttaaacaaattcaaggagagtggcgccaatgtgacaggtttccagctggtgaactacacagacactattccggccaagatcatgcagcagtggaagaatagtgatgctcgagaccacacacgggtggactggaagagacccaagtacacctctgcgctcacctacgatggggtgaaggtgatggctgaggctttccagagcctgcggaggcagagaattgatatatctcgccgggggaatgctggggattgtctggctaacccagctgttccctggggccaagggatcgacatccagagagctctgcagcaggtgcgatttgaaggtttaacaggaaacgtgcagtttaatgagaaaggacgccggaccaactacacgctccacgtgattgaaatgaaacatgacggcatccgaaagattggttactggaatgaagatgataagtttgtccctgcagccaccgatgcccaagctgggggcgataattcaagtgttcagaacagaacatacatcgtcacaacaatcctagaagatccttatgtgatgctcaagaagaacgccaatcagtttgagggcaatgaccgttacgagggctactgtgtagagctggcggcagagattgccaagcacgtgggctactcctaccgtctggagattgtcagtgatggaaaatacggagcccgagaccctgacacgaaggcctggaatggcatggtgggagagctggtctatggaagagcagatgtggctgtggctcccttaactatcactttggtccgggaagaagttatagatttctccaaaccatttatgagtttggggatctccatcatgattaaaaaaccacagaaatccaagccgggtgtcttctccttccttgatcctttggcttatgagatttggatgtgcattgtttttgcctacattggagtgagtgttgtcctcttcctggtcagccgcttcagtccctatgaatggcacagtgaagagtttgaggaaggacgggaccagacaaccagtgaccagtccaatgagtttgggatattcaacagtttgtggttctccctgggagccttcatgcagcaaggatgtgacatttctcccaggtccctgtctggtcgcatcgttggtggcgtctggtggttcttcaccttaatcatcatctcctcatatacagccaatctggccgccttcctgaccgtggagaggatggtgtctcccattgagagtgcagaggacctagcgaagcagacagaaattgcctacgggacgctggaagcaggatctactaaggagttcttcaggaggtctaaaattgctgtgtttgagaagatgtggacatacatgaagtcagcagagccatcagtttttgtgcggaccacagaggaggggatgattcgagtgaggaaatccaaaggcaaatatgcctacctcctggagtccaccatgaatgagtacattgagcagcggaaaccctgtgacaccatgaaggtgggaggtaacttggattccaaaggctatggcattgcaacacccaaggggtctgccctgagaaatccagtaaacctggcagtgttaaaactgaacgagcaggggcttttggacaaattgaaaaacaaatggtggtacgacaagggcgagtgcggcagcgggggaggtgattccaaggtcagccccagacaagacaagcgctctgagcctcagcaatgtggcaggcgtgttctacatcctgatcggaggacttggactagccatgctggttgccttaatcgagttctgctacaaatcccgtagtgaatccaagcggatgaag

SEQ ID NO: 601 - DNA, 9612 bp, Homo sapiens
  source 1..9612: mol_type = genomic DNA
agtagtttgcggcatccggaggagcagcagcagcagtagcggcggcggctggcgcagcgcggagacggacgagcgggcacagacggcagcacagctcccgtgcaccatgcctggcttgcccgggaggcactggcacccgcgtccctagcccggcgctggcccttggcgcgttgcgctccgcagcattccggctgagcgatttcatccgaaatcctaaacctcctaccccaaacccattgcctcctgcttgctcatactccacactcacactccccacaccacacactcactcttcctctctctctcacacattcacacacagcccgagacagacagagaaagcgagacagacctcccgagtgcgcgagcgcccgggaggaagggagcccaacgcagcgcggccagcgcctctccgggaagatgaaatcaagacgctcctgcaagtaaacttcggcggcgacaaaatcgtcgactgtggcagctgctgaggcggaccccagcgacgtgcaactgagctaggagggcttcctcccgcggcggcggcggcggcggcggcggcggcggaccttggagcgacaccccagcccaaacggagagaagagaagcacccggtacccacggcggcggccccgcctctcctggccggtactgttgttgcctccccttccctcttccccattccccgccacccccggccattagaaagaccggggctttgattttcttggacaaattgccatctccccgtttccacaaacttgacgtggagggtcggactgcgttgttaactttgatttcctagacgaaaacgcccgcagaccctcaactgctctgtggggggaactccgctcccacctcggatcctggacagacgcgcccccaagcccttcgaagccagccttagcgcgagggagcgcgctcaagctctggcagcctctctcccctcccccttcctctgctggccccgggaccgccatccgactcaaccctataaccgggtgcccgcggcgcttgccagtaactgactcccgtctgcgacaccccctttctcccgaacaggcctcgaagaggccagtgtggcccccccagaccccggagggcgcattccaagcgggtactctctccgcagtgaactgggagcgctggggggaggtctttgcgcatgccaggtgcacagacagcgagttcgccagcctcagtgccggtgcaccgcggcgggccgggcagtgcctgaaaggctgcgcctcctccgccctctttaccttcgcctcaagtactgtccggactcagcggtgcgtcctccaggccgcgcagacgccgcccgacccgcagccctgggcggctgccgacagtcgcgcccggctaactttgaaggggtaaaactgagtagccgggctggagggagggggctcggggccgcgcggcgctcccttggcccctcggagcccccggggcccccgcgagcccccgccgcgtccgccgcaacctcagcattggagccgccgcgggtgtcccccgcgcgccgccgggccgccctgggcgggacttctcccgcggcctccggggccacggggcgcgcgcaacaggcggcccgagccggcgggaagctggagcgccgacggcgtcggtctcggaggggtgtggagaggcgaggccaggcagagccccgtgcagccatggagtcgctcctgctgccggtgctgctgctgctggccatactgtggacgcaggctgccgccctcattaatctcaagtactcggtagaagaggagcagcgcgccgggacggtgattgccaacgtggccaaagacgcgcgagaggcgggcttcgcgctggacccccggcaggcttcagcctttcgcgtggtgtccaactcggctccacacctagtggacatcaatcccagctctggcctgctggtcaccaagcagaagattgaccgtgatctgctgtgccgccagagccccaagtgcatcatctcgctcgaggtcatgtccagctcaatggaaatctgcgtgataaaggtggagatcaaggacctgaacgacaatgcgcccagtttcccggcagcacagatcgagctggagatctcggaggcagccagccctggcacgcgcatcccgctggacagcgcttacgatccagactcaggaagctttggcgtgcagacttacgagctcacgcccaacgagctgttcggcctggagatcaagacgcgcggcgacggctcccgctttgccgaactcgtggtggaaaagagcctggaccgcgagacgcagtcgcactacagcttccgaatcactgcgctagacggtggcgacccgccgcgcctgggcaccgttggccttagtatcaaggtgaccgactccaatgacaacaacccggtgtttagcgagtccacctacgcggtgagcgtgccagaaaactcgcctcccaacacacccgtcatccgcctcaacgccagcgatccagacgagggcaccaacggccaggtggtctactccttctatggctacgtcaacgaccgcacgcgcgagctctttcagatcgacccgcacagtggcctggtcactgtcactggcgctttagactacgaagaggggcacgtgtacgaactggacgtgcaggctaaggacttggggcccaattccatcccggcacactgcaaggtcaccgtcagcgtgctggacaccaatgacaatccgccggtcatcaacctgctgtcagtcaacagtgagcttgtggaggtcagcgagagcgcccccccgggctacgtgatcgccttggtgcgggtgtctgatcgcgactcaggcctcaatggacgtgtgcagtgccgtttgctgggcaatgtgccctttcgactgcaggaatatgagagcttctccactattctggtggacggacggctggaccgcgagcagcacgaccaatacaacctcacaattcaggcacgcgacggcggcgtgcccatgctgcagagtgccaagtcctttaccgtgctcatcactgacgaaaatgacaaccacccgcacttttccaagccctactaccaggtcattgtgcaggagaacaacacgcctggcgcctatctgctctctgtgtctgctcgcgaccccgacctgggtctcaacggcagtgtctcctaccagatcgtgccgtcgcaggtgcgggacatgcctgtcttcacctatgtctccatcaatcccaactcaggcgacatctacgcgctgcgatcctttaaccacgagcagaccaaggcgttcgaattcaaggtgctggccaaggacggcggccttccctcactgcaaagcaacgctacggtgcgggtcatcatcctcgacgtcaacgacaacaccccggtcatcacagccccacctctgattaacggcactgccgaggtctacataccccgcaactctggcataggctacctggtgactgttgtcaaggcagaagactacgatgagggcgaaaatggccgagtcacctacgacatgaccgagggcgaccgcggcttctttgaaatagaccaggtcaatggcgaagtcagaaccacccgcaccttcggggagagctccaagtcctcctatgagcttatcgtggtggctcacgaccacggcaagacatctctctctgcctctgctctcgtcctaatctacttgtcccctgctctcgatgcccaagagtcaatgggctctgtgaacttgtccttgattttcattattgccctgggctccattgcgggcatcctctttgtaactatgatcttcgtggcaatcaagtgcaagcgagacaacaaagagatccggacctacaactgcagaattgctgagtactcctatgggcatcaaaagaaatcaagcaagaagaaaaaaatcagtaagaatgacatccgcctggtaccccgggatgtggaggagacagacaagatgaacgttgtcagttgctcttccctgacctcctccctcaactattttgactaccaccagcagacgctgcccctgggctgccgccgctctgagagcactttcctgaatgtggagaaccagaatacccgcaacaccagtgctaaccacatctaccatcactctttcaacagccaggggccccagcagcctgacctgattatcaacggtgtgcctctgcctgagactgaaaactattcttttgactccaactacgtgaatagccgagcccatttaatcaagagctccaccttcaaggacttagagggcaacagcctgaaggatagtggacatgaggagagtgaccaaactgacagtgagcatgatgtccagcggagcctgtattgtgatactgctgtcaacgatgtgctgaacaccagtgtgacctccatgggatctcagatgcctgatcatgatcagaatgaaggatttcattgccgggaagaatgccggattcttggccactctgacaggtgctggatgccccggaaccccatgcccatccgttccaagtcccctgagcatgtgaggaacatcatcgcgctgtctattgaagctactgctgctgatgtcgaggcttatgacgactgcggccccaccaaacggactttcgcaacctttgggaaagatgtcagcgaccacccggctgaggagaggcctaccctgaaaggcaagaggactgtcgatgtgaccatctgcagccccaaggtcaacagcgttatccgggaggcaggcaatggctgtgaggcgattagccctgtcacctcccccctccacctcaagagctctctgcccaccaagccttccgtgtcttacaccattgccctggctcccccagcccgtgatctggagcagtatgtcaacaatgtcaacaatggccctactcgtccctctgaagctgagccccgtggagctgatagcgagaaagtcatgcatgaggtcagccccattctgaaggaaggtcgcaacaaagagtcccctggtgtgaagcgtctgaaggatatcgttctctaaaccagtctccaggaagaagagaaagaaaccacactggctagtgaagaagcaggagcttcttgttttaattgctcaccaatggttggttcttgagtggctatatttcagagcttttcctaaatgtattgtttataggtgattatcattctgtgacagtcccttgtttcaacaggcagcaggggtgttcagttggagcaaattagctttggcttgagttgttcatggggccttgatgttggggaaacagagacaaattcagttgtgaaaagtattatgtattaagtgtttgaatttatatatttttctatgtcaaaattataatataaattaccattgtttgtggaggattacatttaaaaaagcaaaaagtgaaaaaaaaaagctctggacacctttaataagctcgccactgttttttgtagtgtagacaagttaatggtcatttattgtgtactattcattgattcagtgatgtgaaattgagcccccaaaaggttgtttctgaagctcgagtacttcccaatgccgctactttgctgtggacacccctgctttaaaaacccttttgctagctgtgctattgttgtatttgatattgcaaattgctatgtgtgtggtgatggcaaaaggcttttaaaagttggtgttttctttttcttaaaaaaataataaaactacagacaaaaacaaagtgcaaacaactgagacagcaaatgaatgagcaacaccatgcatatagattgagtacttggagaatactcacgttttttaactcatgtagtgattgctcaccactttgcaaagtatttttcctgcctttcagtggtctgcccaggtccatgatagatcattgcagaaagtcatttttggataggctgctatctaatttgcagttgtcagaaatactgtgctgaaagttttatgacatccatcttttaaattttcaggccctgaacaggaaagttgctcctgaagttatgtttccaggcttagaaattccctctctccaatcatctaaaattgaagatgactgaatctattttaagatctaaattagcatctcttcagacacacacttcctgattcagtgtttcccaatcatgattagaattagactgcaaagcacgtcatgggctgggattgagaactccatgttgctctgtatcttaggcttatatacgtagggatagagtaagcagtacaaagtgtatattttggaaaagacaggtaacaggtaacagcatcgctaatccaattactgtgccttctaaacggagacactcagacacttgaactcatctttttatgactaatagttttttgattaaaaatgtgaacaagaaaatactaaaataaaaatcctttcgatttagccaactctttttgctgtaggctaggaatacaccctttttaaattaacacactgtagatcctttttttctgttttaacattcctctaactcccccatttatcttttgtctattaatattcactagccaacatagtatttttgcagcctaagagttcattatttaaaaataaactaaagaaatatgtcacctttgttctgccttggtcttaagagagttgtttctagagaaacaagttttatggttctgttttcatttgtttcattttttgaaattcaggaatacacagagagaaggcctagaggttagagcactagaatgcaaaagaggatttattttcttaagtttaggtagataagtcagctcttttgaatgttttacttatttttgcctgagttcctagctttacgcattactaggaatattttcttttacaggagggagaagggttttgagggagggggtgggtaaggcagtagggatggggttaggtaggggagaacatttctgaaaaagaacttataatgaagctacaaatccatccttatttcttattcagtgctgaatactacctcatgcaaaatattggtgtggctgcaaatttccctctgaagctgacacaattaaggatgaattaccataacatcttcatttttcctcatttcattgcctctcatacagttttctccctctgatttatttcattttggtagtggattttgaattaagtatttatttctctttgcaagtgactatttgattaacacattaaaaattttttaaaaatttcccctttaagttatgatggctgcctatagaatttagactgtttctcaccctgatccatcctgatattatgttattagctacgatttcaaggtcactttgaagtcagacttcacagttttctacaggtgtatttcttgctatgctcagtgggaaccagggagcagaaaagattgtggaaagtgggaacattaattgtcacgtggctgttgagccagagaggccactggctgccatgcctcttaccagccaagttttaaatggttagagtggcattggcattgattttgcttttctcttgggttttcttcatttcttttcataattcatcttcaagctatagatccatccttcttccctatccaaatactttgttctcagtgggcagtcagatttttttggcttccaaacctcactgagcatgttcagagaattcctctcattaaggaaatatttttccccacaattgtctgatgtatgagtcctctcagaagcacaagtgcatactaggaaggctttgtaaactggttttgtaggcaggctgtacctgcaaataggcattctgagcaaggatcctaaatttccctttggctcatgtcccccccgccccaccccaccttctcctttttggcatgtctggtgaaaagctacaaggttcacagggccaaatattctcccttttgttctctaaacatgttgcacacataaactcaagggagtgatttcggttcctaagtcctagggagttctattccatttattctgatgtcccttttaaggaggagttggtgttgaagtgtgacatgctttaatgataactgctttggcaattccccagacaggtatacttcttcatccaaaattgcacctaaggtgttcatttagacaaaattgttcgcttagtgatccactgatctctaatcagaaatatttttaaaaaatacaatttagatctctgaaaattggaaccactcaagagtatcatcttgatagtgttacttcagcatatgactgactgattttatgaagggagtttagctgacttttccctgtagccctatcatattaaaaacaaaaagtggtccacttgaagcagcaaggacaaagggcagtttagggagaggcagggtgaaggggatagctcgattgggcatccagagtggaaaaggattattattgtacataatagcagttctggctggaattccaatccactttctggggatcattttgatgttgaatgttcccccaaagcattctgacaagtttggtccacttggctctttaccccgggtaataagacccttattgactttgaaaaactggcataaatgagcttaagaaatccattgtatacagtcctagtgtttgccttcttggtaaaattacatttaaggatgtcatttcatgagtcaaattgtatctgctgacactgaagtgtattgagatgttgttctttagtttaagtatgtaacaaagtaatattcaaaggggatgtttgggggtggggctgggaccgggtggctttatattgataatgaaatattccagagcaaaacacattgtcctaatgaagttgttgcagctctcttcgttttcttgtgccgctggaattggcttgtgggtcacttgttgtgcaaaagtgaattaatttcaaataggaatcatattgcttttgtgaaacaaagaaaatttaccaccttgtctgatacatagattggaaggcgctcttggtaaagaataacccacaaacacctgatcttgattggaaagcattgtaggtcattagggaaaactgatgatgctgactgttgctccagctgtgttggcaattcaagatgaccttgttactaactgaaagttgctgtcaaccttagcaaacaaaccagctaacaccattacagcactggttaagtagatttttactggcactggctggcgttcagctgaggaaggctaggatacagactttaatgaccaagagccagactagctcgagctagaaatcagcaacaaatacctccttgtgctatttgaatgctaaggtattagttgcaataggcttacgccttcgctcctctagtgaggggaatgagcctgatgacactattactgtttacctgtcaaaccagggtggaaatttagagggatgcaagtacagtatgtctcattaagcagtctctgttgctgattatatgaagataaaattgttgtatatgctgatctgtatgttatgtacattttcacagtgattgaatcattgtaaaaagaaaaaagacaaaaaagaatcaccactgtctattttatgaagatgataaagcagctttattaaattattacagttatgtttcaaatggtgttatctgccacattgtttccttttatctggtggttctctgtttccccctttaaatgtgttttctctgcttcaaaaatttaatgcattttagtattaaaggctattatggaaaaagta

SEQ ID NO: 602 - DNA, 9756 bp, Homo sapiens
  source 1..9756: mol_type = genomic DNA
agtagtttgcggcatccggaggagcagcagcagcagtagcggcggcggctggcgcagcgcggagacggacgagcgggcacagacggcagcacagctcccgtgcaccatgcctggcttgcccgggaggcactggcacccgcgtccctagcccggcgctggcccttggcgcgttgcgctccgcagcattccggctgagcgatttcatccgaaatcctaaacctcctaccccaaacccattgcctcctgcttgctcatactccacactcacactccccacaccacacactcactcttcctctctctctcacacattcacacacagcccgagacagacagagaaagcgagacagacctcccgagtgcgcgagcgcccgggaggaagggagcccaacgcagcgcggccagcgcctctccgggaagatgaaatcaagacgctcctgcaagtaaacttcggcggcgacaaaatcgtcgactgtggcagctgctgaggcggaccccagcgacgtgcaactgagctaggagggcttcctcccgcggcggcggcggcggcggcggcggcggcggaccttggagcgacaccccagcccaaacggagagaagagaagcacccggtacccacggcggcggccccgcctctcctggccggtactgttgttgcctccccttccctcttccccattccccgccacccccggccattagaaagaccggggctttgattttcttggacaaattgccatctccccgtttccacaaacttgacgtggagggtcggactgcgttgttaactttgatttcctagacgaaaacgcccgcagaccctcaactgctctgtggggggaactccgctcccacctcggatcctggacagacgcgcccccaagcccttcgaagccagccttagcgcgagggagcgcgctcaagctctggcagcctctctcccctcccccttcctctgctggccccgggaccgccatccgactcaaccctataaccgggtgcccgcggcgcttgccagtaactgactcccgtctgcgacaccccctttctcccgaacaggcctcgaagaggccagtgtggcccccccagaccccggagggcgcattccaagcgggtactctctccgcagtgaactgggagcgctggggggaggtctttgcgcatgccaggtgcacagacagcgagttcgccagcctcagtgccggtgcaccgcggcgggccgggcagtgcctgaaaggctgcgcctcctccgccctctttaccttcgcctcaagtactgtccggactcagcggtgcgtcctccaggccgcgcagacgccgcccgacccgcagccctgggcggctgccgacagtcgcgcccggctaactttgaaggggtaaaactgagtagccgggctggagggagggggctcggggccgcgcggcgctcccttggcccctcggagcccccggggcccccgcgagcccccgccgcgtccgccgcaacctcagcattggagccgccgcgggtgtcccccgcgcgccgccgggccgccctgggcgggacttctcccgcggcctccggggccacggggcgcgcgcaacaggcggcccgagccggcgggaagctggagcgccgacggcgtcggtctcggaggggtgtggagaggcgaggccaggcagagccccgtgcagccatggagtcgctcctgctgccggtgctgctgctgctggccatactgtggacgcaggctgccgccctcattaatctcaagtactcggtagaagaggagcagcgcgccgggacggtgattgccaacgtggccaaagacgcgcgagaggcgggcttcgcgctggacccccggcaggcttcagcctttcgcgtggtgtccaactcggctccacacctagtggacatcaatcccagctctggcctgctggtcaccaagcagaagattgaccgtgatctgctgtgccgccagagccccaagtgcatcatctcgctcgaggtcatgtccagctcaatggaaatctgcgtgataaaggtggagatcaaggacctgaacgacaatgcgcccagtttcccggcagcacagatcgagctggagatctcggaggcagccagccctggcacgcgcatcccgctggacagcgcttacgatccagactcaggaagctttggcgtgcagacttacgagctcacgcccaacgagctgttcggcctggagatcaagacgcgcggcgacggctcccgctttgccgaactcgtggtggaaaagagcctggaccgcgagacgcagtcgcactacagcttccgaatcactgcgctagacggtggcgacccgccgcgcctgggcaccgttggccttagtatcaaggtgaccgactccaatgacaacaacccggtgtttagcgagtccacctacgcggtgagcgtgccagaaaactcgcctcccaacacacccgtcatccgcctcaacgccagcgatccagacgagggcaccaacggccaggtggtctactccttctatggctacgtcaacgaccgcacgcgcgagctctttcagatcgacccgcacagtggcctggtcactgtcactggcgctttagactacgaagaggggcacgtgtacgaactggacgtgcaggctaaggacttggggcccaattccatcccggcacactgcaaggtcaccgtcagcgtgctggacaccaatgacaatccgccggtcatcaacctgctgtcagtcaacagtgagcttgtggaggtcagcgagagcgcccccccgggctacgtgatcgccttggtgcgggtgtctgatcgcgactcaggcctcaatggacgtgtgcagtgccgtttgctgggcaatgtgccctttcgactgcaggaatatgagagcttctccactattctggtggacggacggctggaccgcgagcagcacgaccaatacaacctcacaattcaggcacgcgacggcggcgtgcccatgctgcagagtgccaagtcctttaccgtgctcatcactgacgaaaatgacaaccacccgcacttttccaagccctactaccaggtcattgtgcaggagaacaacacgcctggcgcctatctgctctctgtgtctgctcgcgaccccgacctgggtctcaacggcagtgtctcctaccagatcgtgccgtcgcaggtgcgggacatgcctgtcttcacctatgtctccatcaatcccaactcaggcgacatctacgcgctgcgatcctttaaccacgagcagaccaaggcgttcgaattcaaggtgctggccaaggacggcggccttccctcactgcaaagcaacgctacggtgcgggtcatcatcctcgacgtcaacgacaacaccccggtcatcacagccccacctctgattaacggcactgccgaggtctacataccccgcaactctggcataggctacctggtgactgttgtcaaggcagaagactacgatgagggcgaaaatggccgagtcacctacgacatgaccgagggcgaccgcggcttctttgaaatagaccaggtcaatggcgaagtcagaaccacccgcaccttcggggagagctccaagtcctcctatgagcttatcgtggtggctcacgaccacggcaagacatctctctctgcctctgctctcgtcctaatctacttgtcccctgctctcgatgcccaagagtcaatgggctctgtgaacttgtccttgattttcattattgccctgggctccattgcgggcatcctctttgtaactatgatcttcgtggcaatcaagtgcaagcgagacaacaaagagatccggacctacaactgcagtaattgtttaaccatcacttgtctcctcggctgttttataaaaggacaaaacagcaagtgtctgcattgcatctcggtttctcccattagcgaggagcaagacaaaaagacagaggagaaagtgagcctaaggggaaagagaattgctgagtactcctatgggcatcaaaagaaatcaagcaagaagaaaaaaatcagtaagaatgacatccgcctggtaccccgggatgtggaggagacagacaagatgaacgttgtcagttgctcttccctgacctcctccctcaactattttgactaccaccagcagacgctgcccctgggctgccgccgctctgagagcactttcctgaatgtggagaaccagaatacccgcaacaccagtgctaaccacatctaccatcactctttcaacagccaggggccccagcagcctgacctgattatcaacggtgtgcctctgcctgagactgaaaactattcttttgactccaactacgtgaatagccgagcccatttaatcaagagcagctccaccttcaaggacttagagggcaacagcctgaaggatagtggacatgaggagagtgaccaaactgacagtgagcatgatgtccagcggagcctgtattgtgatactgctgtcaacgatgtgctgaacaccagtgtgacctccatgggatctcagatgcctgatcatgatcagaatgaaggatttcattgccgggaagaatgccggattcttggccactctgacaggtgctggatgccccggaaccccatgcccatccgttccaagtcccctgagcatgtgaggaacatcatcgcgctgtctattgaagctactgctgctgatgtcgaggcttatgacgactgcggccccaccaaacggactttcgcaacctttgggaaagatgtcagcgaccacccggctgaggagaggcctaccctgaaaggcaagaggactgtcgatgtgaccatctgcagccccaaggtcaacagcgttatccgggaggcaggcaatggctgtgaggcgattagccctgtcacctcccccctccacctcaagagctctctgcccaccaagccttccgtgtcttacaccattgccctggctcccccagcccgtgatctggagcagtatgtcaacaatgtcaacaatggccctactcgtccctctgaagctgagccccgtggagctgatagcgagaaagtcatgcatgaggtcagccccattctgaaggaaggtcgcaacaaagagtcccctggtgtgaagcgtctgaaggatatcgttctctaaaccagtctccaggaagaagagaaagaaaccacactggctagtgaagaagcaggagcttcttgttttaattgctcaccaatggttggttcttgagtggctatatttcagagcttttcctaaatgtattgtttataggtgattatcattctgtgacagtcccttgtttcaacaggcagcaggggtgttcagttggagcaaattagctttggcttgagttgttcatggggccttgatgttggggaaacagagacaaattcagttgtgaaaagtattatgtattaagtgtttgaatttatatatttttctatgtcaaaattataatataaattaccattgtttgtggaggattacatttaaaaaagcaaaaagtgaaaaaaaaaagctctggacacctttaataagctcgccactgttttttgtagtgtagacaagttaatggtcatttattgtgtactattcattgattcagtgatgtgaaattgagcccccaaaaggttgtttctgaagctcgagtacttcccaatgccgctactttgctgtggacacccctgctttaaaaacccttttgctagctgtgctattgttgtatttgatattgcaaattgctatgtgtgtggtgatggcaaaaggcttttaaaagttggtgttttctttttcttaaaaaaataataaaactacagacaaaaacaaagtgcaaacaactgagacagcaaatgaatgagcaacaccatgcatatagattgagtacttggagaatactcacgttttttaactcatgtagtgattgctcaccactttgcaaagtatttttcctgcctttcagtggtctgcccaggtccatgatagatcattgcagaaagtcatttttggataggctgctatctaatttgcagttgtcagaaatactgtgctgaaagttttatgacatccatcttttaaattttcaggccctgaacaggaaagttgctcctgaagttatgtttccaggcttagaaattccctctctccaatcatctaaaattgaagatgactgaatctattttaagatctaaattagcatctcttcagacacacacttcctgattcagtgtttcccaatcatgattagaattagactgcaaagcacgtcatgggctgggattgagaactccatgttgctctgtatcttaggcttatatacgtagggatagagtaagcagtacaaagtgtatattttggaaaagacaggtaacaggtaacagcatcgctaatccaattactgtgccttctaaacggagacactcagacacttgaactcatctttttatgactaatagttttttgattaaaaatgtgaacaagaaaatactaaaataaaaatcctttcgatttagccaactctttttgctgtaggctaggaatacaccctttttaaattaacacactgtagatcctttttttctgttttaacattcctctaactcccccatttatcttttgtctattaatattcactagccaacatagtatttttgcagcctaagagttcattatttaaaaataaactaaagaaatatgtcacctttgttctgccttggtcttaagagagttgtttctagagaaacaagttttatggttctgttttcatttgtttcattttttgaaattcaggaatacacagagagaaggcctagaggttagagcactagaatgcaaaagaggatttattttcttaagtttaggtagataagtcagctcttttgaatgttttacttatttttgcctgagttcctagctttacgcattactaggaatattttcttttacaggagggagaagggttttgagggagggggtgggtaaggcagtagggatggggttaggtaggggagaacatttctgaaaaagaacttataatgaagctacaaatccatccttatttcttattcagtgctgaatactacctcatgcaaaatattggtgtggctgcaaatttccctctgaagctgacacaattaaggatgaattaccataacatcttcatttttcctcatttcattgcctctcatacagttttctccctctgatttatttcattttggtagtggattttgaattaagtatttatttctctttgcaagtgactatttgattaacacattaaaaattttttaaaaatttcccctttaagttatgatggctgcctatagaatttagactgtttctcaccctgatccatcctgatattatgttattagctacgatttcaaggtcactttgaagtcagacttcacagttttctacaggtgtatttcttgctatgctcagtgggaaccagggagcagaaaagattgtggaaagtgggaacattaattgtcacgtggctgttgagccagagaggccactggctgccatgcctcttaccagccaagttttaaatggttagagtggcattggcattgattttgcttttctcttgggttttcttcatttcttttcataattcatcttcaagctatagatccatccttcttccctatccaaatactttgttctcagtgggcagtcagatttttttggcttccaaacctcactgagcatgttcagagaattcctctcattaaggaaatatttttccccacaattgtctgatgtatgagtcctctcagaagcacaagtgcatactaggaaggctttgtaaactggttttgtaggcaggctgtacctgcaaataggcattctgagcaaggatcctaaatttccctttggctcatgtcccccccgccccaccccaccttctcctttttggcatgtctggtgaaaagctacaaggttcacagggccaaatattctcccttttgttctctaaacatgttgcacacataaactcaagggagtgatttcggttcctaagtcctagggagttctattccatttattctgatgtcccttttaaggaggagttggtgttgaagtgtgacatgctttaatgataactgctttggcaattccccagacaggtatacttcttcatccaaaattgcacctaaggtgttcatttagacaaaattgttcgcttagtgatccactgatctctaatcagaaatatttttaaaaaatacaatttagatctctgaaaattggaaccactcaagagtatcatcttgatagtgttacttcagcatatgactgactgattttatgaagggagtttagctgacttttccctgtagccctatcatattaaaaacaaaaagtggtccacttgaagcagcaaggacaaagggcagtttagggagaggcagggtgaaggggatagctcgattgggcatccagagtggaaaaggattattattgtacataatagcagttctggctggaattccaatccactttctggggatcattttgatgttgaatgttcccccaaagcattctgacaagtttggtccacttggctctttaccccgggtaataagacccttattgactttgaaaaactggcataaatgagcttaagaaatccattgtatacagtcctagtgtttgccttcttggtaaaattacatttaaggatgtcatttcatgagtcaaattgtatctgctgacactgaagtgtattgagatgttgttctttagtttaagtatgtaacaaagtaatattcaaaggggatgtttgggggtggggctgggaccgggtggctttatattgataatgaaatattccagagcaaaacacattgtcctaatgaagttgttgcagctctcttcgttttcttgtgccgctggaattggcttgtgggtcacttgttgtgcaaaagtgaattaatttcaaataggaatcatattgcttttgtgaaacaaagaaaatttaccaccttgtctgatacatagattggaaggcgctcttggtaaagaataacccacaaacacctgatcttgattggaaagcattgtaggtcattagggaaaactgatgatgctgactgttgctccagctgtgttggcaattcaagatgaccttgttactaactgaaagttgctgtcaaccttagcaaacaaaccagctaacaccattacagcactggttaagtagatttttactggcactggctggcgttcagctgaggaaggctaggatacagactttaatgaccaagagccagactagctcgagctagaaatcagcaacaaatacctccttgtgctatttgaatgctaaggtattagttgcaataggcttacgccttcgctcctctagtgaggggaatgagcctgatgacactattactgtttacctgtcaaaccagggtggaaatttagagggatgcaagtacagtatgtctcattaagcagtctctgttgctgattatatgaagataaaattgttgtatatgctgatctgtatgttatgtacattttcacagtgattgaatcattgtaaaaagaaaaaagacaaaaaagaatcaccactgtctattttatgaagatgataaagcagctttattaaattattacagttatgtttcaaatggtgttatctgccacattgtttccttttatctggtggttctctgtttccccctttaaatgtgttttctctgcttcaaaaatttaatgcattttagtattaaaggctattatggaaaaagta

SEQ ID NO: 603 - DNA, 9615 bp, Homo sapiens
  source 1..9615: mol_type = genomic DNA
agtagtttgcggcatccggaggagcagcagcagcagtagcggcggcggctggcgcagcgcggagacggacgagcgggcacagacggcagcacagctcccgtgcaccatgcctggcttgcccgggaggcactggcacccgcgtccctagcccggcgctggcccttggcgcgttgcgctccgcagcattccggctgagcgatttcatccgaaatcctaaacctcctaccccaaacccattgcctcctgcttgctcatactccacactcacactccccacaccacacactcactcttcctctctctctcacacattcacacacagcccgagacagacagagaaagcgagacagacctcccgagtgcgcgagcgcccgggaggaagggagcccaacgcagcgcggccagcgcctctccgggaagatgaaatcaagacgctcctgcaagtaaacttcggcggcgacaaaatcgtcgactgtggcagctgctgaggcggaccccagcgacgtgcaactgagctaggagggcttcctcccgcggcggcggcggcggcggcggcggcggcggaccttggagcgacaccccagcccaaacggagagaagagaagcacccggtacccacggcggcggccccgcctctcctggccggtactgttgttgcctccccttccctcttccccattccccgccacccccggccattagaaagaccggggctttgattttcttggacaaattgccatctccccgtttccacaaacttgacgtggagggtcggactgcgttgttaactttgatttcctagacgaaaacgcccgcagaccctcaactgctctgtggggggaactccgctcccacctcggatcctggacagacgcgcccccaagcccttcgaagccagccttagcgcgagggagcgcgctcaagctctggcagcctctctcccctcccccttcctctgctggccccgggaccgccatccgactcaaccctataaccgggtgcccgcggcgcttgccagtaactgactcccgtctgcgacaccccctttctcccgaacaggcctcgaagaggccagtgtggcccccccagaccccggagggcgcattccaagcgggtactctctccgcagtgaactgggagcgctggggggaggtctttgcgcatgccaggtgcacagacagcgagttcgccagcctcagtgccggtgcaccgcggcgggccgggcagtgcctgaaaggctgcgcctcctccgccctctttaccttcgcctcaagtactgtccggactcagcggtgcgtcctccaggccgcgcagacgccgcccgacccgcagccctgggcggctgccgacagtcgcgcccggctaactttgaaggggtaaaactgagtagccgggctggagggagggggctcggggccgcgcggcgctcccttggcccctcggagcccccggggcccccgcgagcccccgccgcgtccgccgcaacctcagcattggagccgccgcgggtgtcccccgcgcgccgccgggccgccctgggcgggacttctcccgcggcctccggggccacggggcgcgcgcaacaggcggcccgagccggcgggaagctggagcgccgacggcgtcggtctcggaggggtgtggagaggcgaggccaggcagagccccgtgcagccatggagtcgctcctgctgccggtgctgctgctgctggccatactgtggacgcaggctgccgccctcattaatctcaagtactcggtagaagaggagcagcgcgccgggacggtgattgccaacgtggccaaagacgcgcgagaggcgggcttcgcgctggacccccggcaggcttcagcctttcgcgtggtgtccaactcggctccacacctagtggacatcaatcccagctctggcctgctggtcaccaagcagaagattgaccgtgatctgctgtgccgccagagccccaagtgcatcatctcgctcgaggtcatgtccagctcaatggaaatctgcgtgataaaggtggagatcaaggacctgaacgacaatgcgcccagtttcccggcagcacagatcgagctggagatctcggaggcagccagccctggcacgcgcatcccgctggacagcgcttacgatccagactcaggaagctttggcgtgcagacttacgagctcacgcccaacgagctgttcggcctggagatcaagacgcgcggcgacggctcccgctttgccgaactcgtggtggaaaagagcctggaccgcgagacgcagtcgcactacagcttccgaatcactgcgctagacggtggcgacccgccgcgcctgggcaccgttggccttagtatcaaggtgaccgactccaatgacaacaacccggtgtttagcgagtccacctacgcggtgagcgtgccagaaaactcgcctcccaacacacccgtcatccgcctcaacgccagcgatccagacgagggcaccaacggccaggtggtctactccttctatggctacgtcaacgaccgcacgcgcgagctctttcagatcgacccgcacagtggcctggtcactgtcactggcgctttagactacgaagaggggcacgtgtacgaactggacgtgcaggctaaggacttggggcccaattccatcccggcacactgcaaggtcaccgtcagcgtgctggacaccaatgacaatccgccggtcatcaacctgctgtcagtcaacagtgagcttgtggaggtcagcgagagcgcccccccgggctacgtgatcgccttggtgcgggtgtctgatcgcgactcaggcctcaatggacgtgtgcagtgccgtttgctgggcaatgtgccctttcgactgcaggaatatgagagcttctccactattctggtggacggacggctggaccgcgagcagcacgaccaatacaacctcacaattcaggcacgcgacggcggcgtgcccatgctgcagagtgccaagtcctttaccgtgctcatcactgacgaaaatgacaaccacccgcacttttccaagccctactaccaggtcattgtgcaggagaacaacacgcctggcgcctatctgctctctgtgtctgctcgcgaccccgacctgggtctcaacggcagtgtctcctaccagatcgtgccgtcgcaggtgcgggacatgcctgtcttcacctatgtctccatcaatcccaactcaggcgacatctacgcgctgcgatcctttaaccacgagcagaccaaggcgttcgaattcaaggtgctggccaaggacggcggccttccctcactgcaaagcaacgctacggtgcgggtcatcatcctcgacgtcaacgacaacaccccggtcatcacagccccacctctgattaacggcactgccgaggtctacataccccgcaactctggcataggctacctggtgactgttgtcaaggcagaagactacgatgagggcgaaaatggccgagtcacctacgacatgaccgagggcgaccgcggcttctttgaaatagaccaggtcaatggcgaagtcagaaccacccgcaccttcggggagagctccaagtcctcctatgagcttatcgtggtggctcacgaccacggcaagacatctctctctgcctctgctctcgtcctaatctacttgtcccctgctctcgatgcccaagagtcaatgggctctgtgaacttgtccttgattttcattattgccctgggctccattgcgggcatcctctttgtaactatgatcttcgtggcaatcaagtgcaagcgagacaacaaagagatccggacctacaactgcagaattgctgagtactcctatgggcatcaaaagaaatcaagcaagaagaaaaaaatcagtaagaatgacatccgcctggtaccccgggatgtggaggagacagacaagatgaacgttgtcagttgctcttccctgacctcctccctcaactattttgactaccaccagcagacgctgcccctgggctgccgccgctctgagagcactttcctgaatgtggagaaccagaatacccgcaacaccagtgctaaccacatctaccatcactctttcaacagccaggggccccagcagcctgacctgattatcaacggtgtgcctctgcctgagactgaaaactattcttttgactccaactacgtgaatagccgagcccatttaatcaagagcagctccaccttcaaggacttagagggcaacagcctgaaggatagtggacatgaggagagtgaccaaactgacagtgagcatgatgtccagcggagcctgtattgtgatactgctgtcaacgatgtgctgaacaccagtgtgacctccatgggatctcagatgcctgatcatgatcagaatgaaggatttcattgccgggaagaatgccggattcttggccactctgacaggtgctggatgccccggaaccccatgcccatccgttccaagtcccctgagcatgtgaggaacatcatcgcgctgtctattgaagctactgctgctgatgtcgaggcttatgacgactgcggccccaccaaacggactttcgcaacctttgggaaagatgtcagcgaccacccggctgaggagaggcctaccctgaaaggcaagaggactgtcgatgtgaccatctgcagccccaaggtcaacagcgttatccgggaggcaggcaatggctgtgaggcgattagccctgtcacctcccccctccacctcaagagctctctgcccaccaagccttccgtgtcttacaccattgccctggctcccccagcccgtgatctggagcagtatgtcaacaatgtcaacaatggccctactcgtccctctgaagctgagccccgtggagctgatagcgagaaagtcatgcatgaggtcagccccattctgaaggaaggtcgcaacaaagagtcccctggtgtgaagcgtctgaaggatatcgttctctaaaccagtctccaggaagaagagaaagaaaccacactggctagtgaagaagcaggagcttcttgttttaattgctcaccaatggttggttcttgagtggctatatttcagagcttttcctaaatgtattgtttataggtgattatcattctgtgacagtcccttgtttcaacaggcagcaggggtgttcagttggagcaaattagctttggcttgagttgttcatggggccttgatgttggggaaacagagacaaattcagttgtgaaaagtattatgtattaagtgtttgaatttatatatttttctatgtcaaaattataatataaattaccattgtttgtggaggattacatttaaaaaagcaaaaagtgaaaaaaaaaagctctggacacctttaataagctcgccactgttttttgtagtgtagacaagttaatggtcatttattgtgtactattcattgattcagtgatgtgaaattgagcccccaaaaggttgtttctgaagctcgagtacttcccaatgccgctactttgctgtggacacccctgctttaaaaacccttttgctagctgtgctattgttgtatttgatattgcaaattgctatgtgtgtggtgatggcaaaaggcttttaaaagttggtgttttctttttcttaaaaaaataataaaactacagacaaaaacaaagtgcaaacaactgagacagcaaatgaatgagcaacaccatgcatatagattgagtacttggagaatactcacgttttttaactcatgtagtgattgctcaccactttgcaaagtatttttcctgcctttcagtggtctgcccaggtccatgatagatcattgcagaaagtcatttttggataggctgctatctaatttgcagttgtcagaaatactgtgctgaaagttttatgacatccatcttttaaattttcaggccctgaacaggaaagttgctcctgaagttatgtttccaggcttagaaattccctctctccaatcatctaaaattgaagatgactgaatctattttaagatctaaattagcatctcttcagacacacacttcctgattcagtgtttcccaatcatgattagaattagactgcaaagcacgtcatgggctgggattgagaactccatgttgctctgtatcttaggcttatatacgtagggatagagtaagcagtacaaagtgtatattttggaaaagacaggtaacaggtaacagcatcgctaatccaattactgtgccttctaaacggagacactcagacacttgaactcatctttttatgactaatagttttttgattaaaaatgtgaacaagaaaatactaaaataaaaatcctttcgatttagccaactctttttgctgtaggctaggaatacaccctttttaaattaacacactgtagatcctttttttctgttttaacattcctctaactcccccatttatcttttgtctattaatattcactagccaacatagtatttttgcagcctaagagttcattatttaaaaataaactaaagaaatatgtcacctttgttctgccttggtcttaagagagttgtttctagagaaacaagttttatggttctgttttcatttgtttcattttttgaaattcaggaatacacagagagaaggcctagaggttagagcactagaatgcaaaagaggatttattttcttaagtttaggtagataagtcagctcttttgaatgttttacttatttttgcctgagttcctagctttacgcattactaggaatattttcttttacaggagggagaagggttttgagggagggggtgggtaaggcagtagggatggggttaggtaggggagaacatttctgaaaaagaacttataatgaagctacaaatccatccttatttcttattcagtgctgaatactacctcatgcaaaatattggtgtggctgcaaatttccctctgaagctgacacaattaaggatgaattaccataacatcttcatttttcctcatttcattgcctctcatacagttttctccctctgatttatttcattttggtagtggattttgaattaagtatttatttctctttgcaagtgactatttgattaacacattaaaaattttttaaaaatttcccctttaagttatgatggctgcctatagaatttagactgtttctcaccctgatccatcctgatattatgttattagctacgatttcaaggtcactttgaagtcagacttcacagttttctacaggtgtatttcttgctatgctcagtgggaaccagggagcagaaaagattgtggaaagtgggaacattaattgtcacgtggctgttgagccagagaggccactggctgccatgcctcttaccagccaagttttaaatggttagagtggcattggcattgattttgcttttctcttgggttttcttcatttcttttcataattcatcttcaagctatagatccatccttcttccctatccaaatactttgttctcagtgggcagtcagatttttttggcttccaaacctcactgagcatgttcagagaattcctctcattaaggaaatatttttccccacaattgtctgatgtatgagtcctctcagaagcacaagtgcatactaggaaggctttgtaaactggttttgtaggcaggctgtacctgcaaataggcattctgagcaaggatcctaaatttccctttggctcatgtcccccccgccccaccccaccttctcctttttggcatgtctggtgaaaagctacaaggttcacagggccaaatattctcccttttgttctctaaacatgttgcacacataaactcaagggagtgatttcggttcctaagtcctagggagttctattccatttattctgatgtcccttttaaggaggagttggtgttgaagtgtgacatgctttaatgataactgctttggcaattccccagacaggtatacttcttcatccaaaattgcacctaaggtgttcatttagacaaaattgttcgcttagtgatccactgatctctaatcagaaatatttttaaaaaatacaatttagatctctgaaaattggaaccactcaagagtatcatcttgatagtgttacttcagcatatgactgactgattttatgaagggagtttagctgacttttccctgtagccctatcatattaaaaacaaaaagtggtccacttgaagcagcaaggacaaagggcagtttagggagaggcagggtgaaggggatagctcgattgggcatccagagtggaaaaggattattattgtacataatagcagttctggctggaattccaatccactttctggggatcattttgatgttgaatgttcccccaaagcattctgacaagtttggtccacttggctctttaccccgggtaataagacccttattgactttgaaaaactggcataaatgagcttaagaaatccattgtatacagtcctagtgtttgccttcttggtaaaattacatttaaggatgtcatttcatgagtcaaattgtatctgctgacactgaagtgtattgagatgttgttctttagtttaagtatgtaacaaagtaatattcaaaggggatgtttgggggtggggctgggaccgggtggctttatattgataatgaaatattccagagcaaaacacattgtcctaatgaagttgttgcagctctcttcgttttcttgtgccgctggaattggcttgtgggtcacttgttgtgcaaaagtgaattaatttcaaataggaatcatattgcttttgtgaaacaaagaaaatttaccaccttgtctgatacatagattggaaggcgctcttggtaaagaataacccacaaacacctgatcttgattggaaagcattgtaggtcattagggaaaactgatgatgctgactgttgctccagctgtgttggcaattcaagatgaccttgttactaactgaaagttgctgtcaaccttagcaaacaaaccagctaacaccattacagcactggttaagtagatttttactggcactggctggcgttcagctgaggaaggctaggatacagactttaatgaccaagagccagactagctcgagctagaaatcagcaacaaatacctccttgtgctatttgaatgctaaggtattagttgcaataggcttacgccttcgctcctctagtgaggggaatgagcctgatgacactattactgtttacctgtcaaaccagggtggaaatttagagggatgcaagtacagtatgtctcattaagcagtctctgttgctgattatatgaagataaaattgttgtatatgctgatctgtatgttatgtacattttcacagtgattgaatcattgtaaaaagaaaaaagacaaaaaagaatcaccactgtctattttatgaagatgataaagcagctttattaaattattacagttatgtttcaaatggtgttatctgccacattgtttccttttatctggtggttctctgtttccccctttaaatgtgttttctctgcttcaaaaatttaatgcattttagtattaaaggctattatggaaaaagta

SEQ ID NO: 604 - DNA, 9753 bp, Homo sapiens
  source 1..9753: mol_type = genomic DNA
agtagtttgcggcatccggaggagcagcagcagcagtagcggcggcggctggcgcagcgcggagacggacgagcgggcacagacggcagcacagctcccgtgcaccatgcctggcttgcccgggaggcactggcacccgcgtccctagcccggcgctggcccttggcgcgttgcgctccgcagcattccggctgagcgatttcatccgaaatcctaaacctcctaccccaaacccattgcctcctgcttgctcatactccacactcacactccccacaccacacactcactcttcctctctctctcacacattcacacacagcccgagacagacagagaaagcgagacagacctcccgagtgcgcgagcgcccgggaggaagggagcccaacgcagcgcggccagcgcctctccgggaagatgaaatcaagacgctcctgcaagtaaacttcggcggcgacaaaatcgtcgactgtggcagctgctgaggcggaccccagcgacgtgcaactgagctaggagggcttcctcccgcggcggcggcggcggcggcggcggcggcggaccttggagcgacaccccagcccaaacggagagaagagaagcacccggtacccacggcggcggccccgcctctcctggccggtactgttgttgcctccccttccctcttccccattccccgccacccccggccattagaaagaccggggctttgattttcttggacaaattgccatctccccgtttccacaaacttgacgtggagggtcggactgcgttgttaactttgatttcctagacgaaaacgcccgcagaccctcaactgctctgtggggggaactccgctcccacctcggatcctggacagacgcgcccccaagcccttcgaagccagccttagcgcgagggagcgcgctcaagctctggcagcctctctcccctcccccttcctctgctggccccgggaccgccatccgactcaaccctataaccgggtgcccgcggcgcttgccagtaactgactcccgtctgcgacaccccctttctcccgaacaggcctcgaagaggccagtgtggcccccccagaccccggagggcgcattccaagcgggtactctctccgcagtgaactgggagcgctggggggaggtctttgcgcatgccaggtgcacagacagcgagttcgccagcctcagtgccggtgcaccgcggcgggccgggcagtgcctgaaaggctgcgcctcctccgccctctttaccttcgcctcaagtactgtccggactcagcggtgcgtcctccaggccgcgcagacgccgcccgacccgcagccctgggcggctgccgacagtcgcgcccggctaactttgaaggggtaaaactgagtagccgggctggagggagggggctcggggccgcgcggcgctcccttggcccctcggagcccccggggcccccgcgagcccccgccgcgtccgccgcaacctcagcattggagccgccgcgggtgtcccccgcgcgccgccgggccgccctgggcgggacttctcccgcggcctccggggccacggggcgcgcgcaacaggcggcccgagccggcgggaagctggagcgccgacggcgtcggtctcggaggggtgtggagaggcgaggccaggcagagccccgtgcagccatggagtcgctcctgctgccggtgctgctgctgctggccatactgtggacgcaggctgccgccctcattaatctcaagtactcggtagaagaggagcagcgcgccgggacggtgattgccaacgtggccaaagacgcgcgagaggcgggcttcgcgctggacccccggcaggcttcagcctttcgcgtggtgtccaactcggctccacacctagtggacatcaatcccagctctggcctgctggtcaccaagcagaagattgaccgtgatctgctgtgccgccagagccccaagtgcatcatctcgctcgaggtcatgtccagctcaatggaaatctgcgtgataaaggtggagatcaaggacctgaacgacaatgcgcccagtttcccggcagcacagatcgagctggagatctcggaggcagccagccctggcacgcgcatcccgctggacagcgcttacgatccagactcaggaagctttggcgtgcagacttacgagctcacgcccaacgagctgttcggcctggagatcaagacgcgcggcgacggctcccgctttgccgaactcgtggtggaaaagagcctggaccgcgagacgcagtcgcactacagcttccgaatcactgcgctagacggtggcgacccgccgcgcctgggcaccgttggccttagtatcaaggtgaccgactccaatgacaacaacccggtgtttagcgagtccacctacgcggtgagcgtgccagaaaactcgcctcccaacacacccgtcatccgcctcaacgccagcgatccagacgagggcaccaacggccaggtggtctactccttctatggctacgtcaacgaccgcacgcgcgagctctttcagatcgacccgcacagtggcctggtcactgtcactggcgctttagactacgaagaggggcacgtgtacgaactggacgtgcaggctaaggacttggggcccaattccatcccggcacactgcaaggtcaccgtcagcgtgctggacaccaatgacaatccgccggtcatcaacctgctgtcagtcaacagtgagcttgtggaggtcagcgagagcgcccccccgggctacgtgatcgccttggtgcgggtgtctgatcgcgactcaggcctcaatggacgtgtgcagtgccgtttgctgggcaatgtgccctttcgactgcaggaatatgagagcttctccactattctggtggacggacggctggaccgcgagcagcacgaccaatacaacctcacaattcaggcacgcgacggcggcgtgcccatgctgcagagtgccaagtcctttaccgtgctcatcactgacgaaaatgacaaccacccgcacttttccaagccctactaccaggtcattgtgcaggagaacaacacgcctggcgcctatctgctctctgtgtctgctcgcgaccccgacctgggtctcaacggcagtgtctcctaccagatcgtgccgtcgcaggtgcgggacatgcctgtcttcacctatgtctccatcaatcccaactcaggcgacatctacgcgctgcgatcctttaaccacgagcagaccaaggcgttcgaattcaaggtgctggccaaggacggcggccttccctcactgcaaagcaacgctacggtgcgggtcatcatcctcgacgtcaacgacaacaccccggtcatcacagccccacctctgattaacggcactgccgaggtctacataccccgcaactctggcataggctacctggtgactgttgtcaaggcagaagactacgatgagggcgaaaatggccgagtcacctacgacatgaccgagggcgaccgcggcttctttgaaatagaccaggtcaatggcgaagtcagaaccacccgcaccttcggggagagctccaagtcctcctatgagcttatcgtggtggctcacgaccacggcaagacatctctctctgcctctgctctcgtcctaatctacttgtcccctgctctcgatgcccaagagtcaatgggctctgtgaacttgtccttgattttcattattgccctgggctccattgcgggcatcctctttgtaactatgatcttcgtggcaatcaagtgcaagcgagacaacaaagagatccggacctacaactgcagtaattgtttaaccatcacttgtctcctcggctgttttataaaaggacaaaacagcaagtgtctgcattgcatctcggtttctcccattagcgaggagcaagacaaaaagacagaggagaaagtgagcctaaggggaaagagaattgctgagtactcctatgggcatcaaaagaaatcaagcaagaagaaaaaaatcagtaagaatgacatccgcctggtaccccgggatgtggaggagacagacaagatgaacgttgtcagttgctcttccctgacctcctccctcaactattttgactaccaccagcagacgctgcccctgggctgccgccgctctgagagcactttcctgaatgtggagaaccagaatacccgcaacaccagtgctaaccacatctaccatcactctttcaacagccaggggccccagcagcctgacctgattatcaacggtgtgcctctgcctgagactgaaaactattcttttgactccaactacgtgaatagccgagcccatttaatcaagagctccaccttcaaggacttagagggcaacagcctgaaggatagtggacatgaggagagtgaccaaactgacagtgagcatgatgtccagcggagcctgtattgtgatactgctgtcaacgatgtgctgaacaccagtgtgacctccatgggatctcagatgcctgatcatgatcagaatgaaggatttcattgccgggaagaatgccggattcttggccactctgacaggtgctggatgccccggaaccccatgcccatccgttccaagtcccctgagcatgtgaggaacatcatcgcgctgtctattgaagctactgctgctgatgtcgaggcttatgacgactgcggccccaccaaacggactttcgcaacctttgggaaagatgtcagcgaccacccggctgaggagaggcctaccctgaaaggcaagaggactgtcgatgtgaccatctgcagccccaaggtcaacagcgttatccgggaggcaggcaatggctgtgaggcgattagccctgtcacctcccccctccacctcaagagctctctgcccaccaagccttccgtgtcttacaccattgccctggctcccccagcccgtgatctggagcagtatgtcaacaatgtcaacaatggccctactcgtccctctgaagctgagccccgtggagctgatagcgagaaagtcatgcatgaggtcagccccattctgaaggaaggtcgcaacaaagagtcccctggtgtgaagcgtctgaaggatatcgttctctaaaccagtctccaggaagaagagaaagaaaccacactggctagtgaagaagcaggagcttcttgttttaattgctcaccaatggttggttcttgagtggctatatttcagagcttttcctaaatgtattgtttataggtgattatcattctgtgacagtcccttgtttcaacaggcagcaggggtgttcagttggagcaaattagctttggcttgagttgttcatggggccttgatgttggggaaacagagacaaattcagttgtgaaaagtattatgtattaagtgtttgaatttatatatttttctatgtcaaaattataatataaattaccattgtttgtggaggattacatttaaaaaagcaaaaagtgaaaaaaaaaagctctggacacctttaataagctcgccactgttttttgtagtgtagacaagttaatggtcatttattgtgtactattcattgattcagtgatgtgaaattgagcccccaaaaggttgtttctgaagctcgagtacttcccaatgccgctactttgctgtggacacccctgctttaaaaacccttttgctagctgtgctattgttgtatttgatattgcaaattgctatgtgtgtggtgatggcaaaaggcttttaaaagttggtgttttctttttcttaaaaaaataataaaactacagacaaaaacaaagtgcaaacaactgagacagcaaatgaatgagcaacaccatgcatatagattgagtacttggagaatactcacgttttttaactcatgtagtgattgctcaccactttgcaaagtatttttcctgcctttcagtggtctgcccaggtccatgatagatcattgcagaaagtcatttttggataggctgctatctaatttgcagttgtcagaaatactgtgctgaaagttttatgacatccatcttttaaattttcaggccctgaacaggaaagttgctcctgaagttatgtttccaggcttagaaattccctctctccaatcatctaaaattgaagatgactgaatctattttaagatctaaattagcatctcttcagacacacacttcctgattcagtgtttcccaatcatgattagaattagactgcaaagcacgtcatgggctgggattgagaactccatgttgctctgtatcttaggcttatatacgtagggatagagtaagcagtacaaagtgtatattttggaaaagacaggtaacaggtaacagcatcgctaatccaattactgtgccttctaaacggagacactcagacacttgaactcatctttttatgactaatagttttttgattaaaaatgtgaacaagaaaatactaaaataaaaatcctttcgatttagccaactctttttgctgtaggctaggaatacaccctttttaaattaacacactgtagatcctttttttctgttttaacattcctctaactcccccatttatcttttgtctattaatattcactagccaacatagtatttttgcagcctaagagttcattatttaaaaataaactaaagaaatatgtcacctttgttctgccttggtcttaagagagttgtttctagagaaacaagttttatggttctgttttcatttgtttcattttttgaaattcaggaatacacagagagaaggcctagaggttagagcactagaatgcaaaagaggatttattttcttaagtttaggtagataagtcagctcttttgaatgttttacttatttttgcctgagttcctagctttacgcattactaggaatattttcttttacaggagggagaagggttttgagggagggggtgggtaaggcagtagggatggggttaggtaggggagaacatttctgaaaaagaacttataatgaagctacaaatccatccttatttcttattcagtgctgaatactacctcatgcaaaatattggtgtggctgcaaatttccctctgaagctgacacaattaaggatgaattaccataacatcttcatttttcctcatttcattgcctctcatacagttttctccctctgatttatttcattttggtagtggattttgaattaagtatttatttctctttgcaagtgactatttgattaacacattaaaaattttttaaaaatttcccctttaagttatgatggctgcctatagaatttagactgtttctcaccctgatccatcctgatattatgttattagctacgatttcaaggtcactttgaagtcagacttcacagttttctacaggtgtatttcttgctatgctcagtgggaaccagggagcagaaaagattgtggaaagtgggaacattaattgtcacgtggctgttgagccagagaggccactggctgccatgcctcttaccagccaagttttaaatggttagagtggcattggcattgattttgcttttctcttgggttttcttcatttcttttcataattcatcttcaagctatagatccatccttcttccctatccaaatactttgttctcagtgggcagtcagatttttttggcttccaaacctcactgagcatgttcagagaattcctctcattaaggaaatatttttccccacaattgtctgatgtatgagtcctctcagaagcacaagtgcatactaggaaggctttgtaaactggttttgtaggcaggctgtacctgcaaataggcattctgagcaaggatcctaaatttccctttggctcatgtcccccccgccccaccccaccttctcctttttggcatgtctggtgaaaagctacaaggttcacagggccaaatattctcccttttgttctctaaacatgttgcacacataaactcaagggagtgatttcggttcctaagtcctagggagttctattccatttattctgatgtcccttttaaggaggagttggtgttgaagtgtgacatgctttaatgataactgctttggcaattccccagacaggtatacttcttcatccaaaattgcacctaaggtgttcatttagacaaaattgttcgcttagtgatccactgatctctaatcagaaatatttttaaaaaatacaatttagatctctgaaaattggaaccactcaagagtatcatcttgatagtgttacttcagcatatgactgactgattttatgaagggagtttagctgacttttccctgtagccctatcatattaaaaacaaaaagtggtccacttgaagcagcaaggacaaagggcagtttagggagaggcagggtgaaggggatagctcgattgggcatccagagtggaaaaggattattattgtacataatagcagttctggctggaattccaatccactttctggggatcattttgatgttgaatgttcccccaaagcattctgacaagtttggtccacttggctctttaccccgggtaataagacccttattgactttgaaaaactggcataaatgagcttaagaaatccattgtatacagtcctagtgtttgccttcttggtaaaattacatttaaggatgtcatttcatgagtcaaattgtatctgctgacactgaagtgtattgagatgttgttctttagtttaagtatgtaacaaagtaatattcaaaggggatgtttgggggtggggctgggaccgggtggctttatattgataatgaaatattccagagcaaaacacattgtcctaatgaagttgttgcagctctcttcgttttcttgtgccgctggaattggcttgtgggtcacttgttgtgcaaaagtgaattaatttcaaataggaatcatattgcttttgtgaaacaaagaaaatttaccaccttgtctgatacatagattggaaggcgctcttggtaaagaataacccacaaacacctgatcttgattggaaagcattgtaggtcattagggaaaactgatgatgctgactgttgctccagctgtgttggcaattcaagatgaccttgttactaactgaaagttgctgtcaaccttagcaaacaaaccagctaacaccattacagcactggttaagtagatttttactggcactggctggcgttcagctgaggaaggctaggatacagactttaatgaccaagagccagactagctcgagctagaaatcagcaacaaatacctccttgtgctatttgaatgctaaggtattagttgcaataggcttacgccttcgctcctctagtgaggggaatgagcctgatgacactattactgtttacctgtcaaaccagggtggaaatttagagggatgcaagtacagtatgtctcattaagcagtctctgttgctgattatatgaagataaaattgttgtatatgctgatctgtatgttatgtacattttcacagtgattgaatcattgtaaaaagaaaaaagacaaaaaagaatcaccactgtctattttatgaagatgataaagcagctttattaaattattacagttatgtttcaaatggtgttatctgccacattgtttccttttatctggtggttctctgtttccccctttaaatgtgttttctctgcttcaaaaatttaatgcattttagtattaaaggctattatggaaaaagta

SEQ ID NO: 605 - DNA, 3569 bp, Homo sapiens
  source 1..3569: mol_type = genomic DNA
agtgacgctgcggcctccttctgcctaggtcccaacgcttcggggcaggggtgcggtcttgcaataggaagccgagcgtcttgcaagcttcccgtcgggcaccagctactcggccccgcaccctacctggtgcattccctagacacctccggggtccctacctggagatccccggagccccccttcctgcgccagccatgcctttaaaccgcactttgtccatgtcctcactgccaggactggaggactgggaggatgaattcgacctggagaacgcagtgctcttcgaagtggcctgggaggtggctaacaaggtgggtggcatctacacggtgctgcagacgaaggcgaaggtgacaggggacgaatggggcgacaactacttcctggtggggccgtacacggagcagggcgtgaggacccaggtggaactgctggaggcccccaccccggccctgaagaggacactggattccatgaacagcaagggctgcaaggtgtatttcgggcgctggctgatcgagggaggccctctggtggtgctcctggacgtgggtgcctcagcttgggccctggagcgctggaagggagagctctgggatacctgcaacatcggagtgccgtggtacgaccgcgaggccaacgacgctgtcctctttggctttctgaccacctggttcctgggtgagttcctggcacagagtgaggagaagccacatgtggttgctcacttccatgagtggttggcaggcgttggactctgcctgtgtcgtgcccggcgactgcctgtagcaaccatcttcaccacccatgccacgctgctggggcgctacctgtgtgccggtgccgtggacttctacaacaacctggagaacttcaacgtggacaaggaagcaggggagaggcagatctaccaccgatactgcatggaaagggcggcagcccactgcgctcacgtcttcactactgtgtcccagatcaccgccatcgaggcacagcacttgctcaagaggaaaccagatattgtgacccccaatgggctgaatgtgaagaagttttctgccatgcatgagttccagaacctccatgctcagagcaaggctcgaatccaggagtttgtgcggggccatttttatgggcatctggacttcaacttggacaagaccttatacttctttatcgccggccgctatgagttctccaacaagggtgctgacgtcttcctggaggcattggctcggctcaactatctgctcagagtgaacggcagcgagcagacagtggttgccttcttcatcatgccagcgcggaccaacaatttcaacgtggaaaccctcaaaggccaagctgtgcgcaaacagctttgggacacggccaacacggtgaaggaaaagttcgggaggaagctttatgaatccttactggttgggagccttcccgacatgaacaagatgctggataaggaagacttcactatgatgaagagagccatctttgcaacgcagcggcagtctttcccccctgtgtgcacccacaatatgctggatgactcctcagaccccatcctgaccaccatccgccgaatcggcctcttcaatagcagtgccgacagggtgaaggtgattttccacccggagttcctctcctccacaagccccctgctccctgtggactatgaggagtttgtccgtggctgtcaccttggagtcttcccctcctactatgagccttggggctacacaccggctgagtgcacggttatgggaatccccagtatctccaccaatctctccggcttcggctgcttcatggaggaacacatcgcagacccctcagcttacggtatctacattcttgaccggcggttccgcagcctggatgattcctgctcgcagctcacctccttcctctacagtttctgtcagcagagccggcggcagcgtatcatccagcggaaccgcacggagcgcctctccgaccttctggactggaaatacctaggccggtactatatgtctgcgcgccacatggcgctgtccaaggcctttccagagcacttcacctacgagcccaacgaggcggatgcggcccaggggtaccgctacccacggccagcctcggtgccaccgtcgccctcgctgtcacgacactccagcccgcaccagagtgaggacgaggaggatccccggaacgggccgctggaggaagacggcgagcgctacgatgaggacgaggaggccgccaaggaccggcgcaacatccgtgcaccagagtggccgcgccgagcgtcctgcacctcctccaccagcggcagcaagcgcaactctgtggacacggccacctccagctcactcagcaccccgagcgagcccctcagccccaccagctccctgggcgaggagcgtaactaagtccgccccaccacactccccgcctgtcctgcctctctgctccagagagaggatgcagaggggtgctgctcctaaacccccgctccagatctgcactgggtgtggccccgcagtgcccccacccagtccgccaaacactccaccccctccagctccagtttccaagttcctgcactccagaatccacaaagccgtgcctttctctggctccagaatatgcataatcagcgccctggagtcccctgggcctggaccgcttcccagaggccaggaatctgccattactctgcggtggtgccagaggttttaggaaacctggcatggtgctttcaggtctggggcttttagagccccccgtgtggcttacaaattctacagcatacagagcaggccacgctcaggcccggcatgcgggccaccaagttctggaaaccacgtggtgtccctgcgaatggggcgatcaagtccagagccggggcactttcagagtttgaaggtaactgagagcagatggtcctccatttcaactccagaagtggggctctgggagggatgttctagccctccctggcatgtcagagccaggctctgcctggaggatccctccatccggctcctgtcatcccctacactttggccaagcaagaggtggtagaaccacttggctgctcattccttctggaggacacacagtctcagtccagatgccttcctgtctttctggccctttctggaccagatcctactcttcctttctaaatctgagatctccctccagggaatccgcctgcagaggacagagctggctgtcttcccccacccctaacctggcttattcccaactgctctgcccactgtgaaaccactaggttctaggtcctggcttctagatctggaaccttaccacgttactgcatactgatccctttcccatgatccagaactgaggtcactgggttctagaacccccacatttacctcgaggctcttccatccccaaactgtgccctgccttcagctttggtgaaagggagggcccctcatgtgtgctgtgctgtgtctgcaccgcttggtttgcagttgagaggggagggcaggaggggtgtgattggagtgtgtccggagatgagatgaaaaaaatacatctatatttaagaa

SEQ ID NO: 606 - DNA, 3377 bp, Homo sapiens
  source 1..3377: mol_type = genomic DNA
agtgacgctgcggcctccttctgcctaggtcccaacgcttcggggcaggggtgcggtcttgcaataggaagccgagcgtcttgcaagcttcccgtcgggcaccagctactcggccccgcaccctacctggtgcattccctagacacctccggggtccctacctggagatccccggagccccccttcctgcgccagccatgcctttaaaccgcactttgtccatgtcctcactgccaggactggaggactgggaggatgaattcgacctggagaacgcagtgctcttcgaagtggcctgggaggtggctaacaaggtgggtggcatctacacggtgctgcagacgaaggcgaaggtgacaggggacgaatggggcgacaactacttcctggtggggccgtacacggagcagggcgtgaggacccaggtggaactgctggaggcccccaccccggccctgaagaggacactggattccatgaacagcaagggctgcaagttcctggcacagagtgaggagaagccacatgtggttgctcacttccatgagtggttggcaggcgttggactctgcctgtgtcgtgcccggcgactgcctgtagcaaccatcttcaccacccatgccacgctgctggggcgctacctgtgtgccggtgccgtggacttctacaacaacctggagaacttcaacgtggacaaggaagcaggggagaggcagatctaccaccgatactgcatggaaagggcggcagcccactgcgctcacgtcttcactactgtgtcccagatcaccgccatcgaggcacagcacttgctcaagaggaaaccagatattgtgacccccaatgggctgaatgtgaagaagttttctgccatgcatgagttccagaacctccatgctcagagcaaggctcgaatccaggagtttgtgcggggccatttttatgggcatctggacttcaacttggacaagaccttatacttctttatcgccggccgctatgagttctccaacaagggtgctgacgtcttcctggaggcattggctcggctcaactatctgctcagagtgaacggcagcgagcagacagtggttgccttcttcatcatgccagcgcggaccaacaatttcaacgtggaaaccctcaaaggccaagctgtgcgcaaacagctttgggacacggccaacacggtgaaggaaaagttcgggaggaagctttatgaatccttactggttgggagccttcccgacatgaacaagatgctggataaggaagacttcactatgatgaagagagccatctttgcaacgcagcggcagtctttcccccctgtgtgcacccacaatatgctggatgactcctcagaccccatcctgaccaccatccgccgaatcggcctcttcaatagcagtgccgacagggtgaaggtgattttccacccggagttcctctcctccacaagccccctgctccctgtggactatgaggagtttgtccgtggctgtcaccttggagtcttcccctcctactatgagccttggggctacacaccggctgagtgcacggttatgggaatccccagtatctccaccaatctctccggcttcggctgcttcatggaggaacacatcgcagacccctcagcttacggtatctacattcttgaccggcggttccgcagcctggatgattcctgctcgcagctcacctccttcctctacagtttctgtcagcagagccggcggcagcgtatcatccagcggaaccgcacggagcgcctctccgaccttctggactggaaatacctaggccggtactatatgtctgcgcgccacatggcgctgtccaaggcctttccagagcacttcacctacgagcccaacgaggcggatgcggcccaggggtaccgctacccacggccagcctcggtgccaccgtcgccctcgctgtcacgacactccagcccgcaccagagtgaggacgaggaggatccccggaacgggccgctggaggaagacggcgagcgctacgatgaggacgaggaggccgccaaggaccggcgcaacatccgtgcaccagagtggccgcgccgagcgtcctgcacctcctccaccagcggcagcaagcgcaactctgtggacacggccacctccagctcactcagcaccccgagcgagcccctcagccccaccagctccctgggcgaggagcgtaactaagtccgccccaccacactccccgcctgtcctgcctctctgctccagagagaggatgcagaggggtgctgctcctaaacccccgctccagatctgcactgggtgtggccccgcagtgcccccacccagtccgccaaacactccaccccctccagctccagtttccaagttcctgcactccagaatccacaaagccgtgcctttctctggctccagaatatgcataatcagcgccctggagtcccctgggcctggaccgcttcccagaggccaggaatctgccattactctgcggtggtgccagaggttttaggaaacctggcatggtgctttcaggtctggggcttttagagccccccgtgtggcttacaaattctacagcatacagagcaggccacgctcaggcccggcatgcgggccaccaagttctggaaaccacgtggtgtccctgcgaatggggcgatcaagtccagagccggggcactttcagagtttgaaggtaactgagagcagatggtcctccatttcaactccagaagtggggctctgggagggatgttctagccctccctggcatgtcagagccaggctctgcctggaggatccctccatccggctcctgtcatcccctacactttggccaagcaagaggtggtagaaccacttggctgctcattccttctggaggacacacagtctcagtccagatgccttcctgtctttctggccctttctggaccagatcctactcttcctttctaaatctgagatctccctccagggaatccgcctgcagaggacagagctggctgtcttcccccacccctaacctggcttattcccaactgctctgcccactgtgaaaccactaggttctaggtcctggcttctagatctggaaccttaccacgttactgcatactgatccctttcccatgatccagaactgaggtcactgggttctagaacccccacatttacctcgaggctcttccatccccaaactgtgccctgccttcagctttggtgaaagggagggcccctcatgtgtgctgtgctgtgtctgcaccgcttggtttgcagttgagaggggagggcaggaggggtgtgattggagtgtgtccggagatgagatgaaaaaaatacatctatatttaagaa

SEQ ID NO: 607 - DNA, 3387 bp, Homo sapiens
  source 1..3387: mol_type = genomic DNA
agtgacgctgcggcctccttctgcctaggtcccaacgcttcggggcaggggtgcggtcttgcaataggaagccgagcgtcttgcaagcttcccgtcgggcaccagctactcggccccgcaccctacctggtgcattccctagacacctccggggtccctacctggagatccccggagccccccttcctgcgccagccatgcctttaaaccgcactttgtccatgtcctcactgccaggactggaggactgggaggatgaattcgacctggagaacgcagtgctcttcgaagtggcctgggaggtggctaacaagggtgtatttcgggcgctggctgatcgagggaggccctctggtggtgctcctggacgtgggtgcctcagcttgggccctggagcgctggaagggagagctctgggatacctgcaacatcggagtgccgtggtacgaccgcgaggccaacgacgctgtcctctttggctttctgaccacctggttcctgggtgagttcctggcacagagtgaggagaagccacatgtggttgctcacttccatgagtggttggcaggcgttggactctgcctgtgtcgtgcccggcgactgcctgtagcaaccatcttcaccacccatgccacgctgctggggcgctacctgtgtgccggtgccgtggacttctacaacaacctggagaacttcaacgtggacaaggaagcaggggagaggcagatctaccaccgatactgcatggaaagggcggcagcccactgcgctcacgtcttcactactgtgtcccagatcaccgccatcgaggcacagcacttgctcaagaggaaaccagatattgtgacccccaatgggctgaatgtgaagaagttttctgccatgcatgagttccagaacctccatgctcagagcaaggctcgaatccaggagtttgtgcggggccatttttatgggcatctggacttcaacttggacaagaccttatacttctttatcgccggccgctatgagttctccaacaagggtgctgacgtcttcctggaggcattggctcggctcaactatctgctcagagtgaacggcagcgagcagacagtggttgccttcttcatcatgccagcgcggaccaacaatttcaacgtggaaaccctcaaaggccaagctgtgcgcaaacagctttgggacacggccaacacggtgaaggaaaagttcgggaggaagctttatgaatccttactggttgggagccttcccgacatgaacaagatgctggataaggaagacttcactatgatgaagagagccatctttgcaacgcagcggcagtctttcccccctgtgtgcacccacaatatgctggatgactcctcagaccccatcctgaccaccatccgccgaatcggcctcttcaatagcagtgccgacagggtgaaggtgattttccacccggagttcctctcctccacaagccccctgctccctgtggactatgaggagtttgtccgtggctgtcaccttggagtcttcccctcctactatgagccttggggctacacaccggctgagtgcacggttatgggaatccccagtatctccaccaatctctccggcttcggctgcttcatggaggaacacatcgcagacccctcagcttacggtatctacattcttgaccggcggttccgcagcctggatgattcctgctcgcagctcacctccttcctctacagtttctgtcagcagagccggcggcagcgtatcatccagcggaaccgcacggagcgcctctccgaccttctggactggaaatacctaggccggtactatatgtctgcgcgccacatggcgctgtccaaggcctttccagagcacttcacctacgagcccaacgaggcggatgcggcccaggggtaccgctacccacggccagcctcggtgccaccgtcgccctcgctgtcacgacactccagcccgcaccagagtgaggacgaggaggatccccggaacgggccgctggaggaagacggcgagcgctacgatgaggacgaggaggccgccaaggaccggcgcaacatccgtgcaccagagtggccgcgccgagcgtcctgcacctcctccaccagcggcagcaagcgcaactctgtggacacggccacctccagctcactcagcaccccgagcgagcccctcagccccaccagctccctgggcgaggagcgtaactaagtccgccccaccacactccccgcctgtcctgcctctctgctccagagagaggatgcagaggggtgctgctcctaaacccccgctccagatctgcactgggtgtggccccgcagtgcccccacccagtccgccaaacactccaccccctccagctccagtttccaagttcctgcactccagaatccacaaagccgtgcctttctctggctccagaatatgcataatcagcgccctggagtcccctgggcctggaccgcttcccagaggccaggaatctgccattactctgcggtggtgccagaggttttaggaaacctggcatggtgctttcaggtctggggcttttagagccccccgtgtggcttacaaattctacagcatacagagcaggccacgctcaggcccggcatgcgggccaccaagttctggaaaccacgtggtgtccctgcgaatggggcgatcaagtccagagccggggcactttcagagtttgaaggtaactgagagcagatggtcctccatttcaactccagaagtggggctctgggagggatgttctagccctccctggcatgtcagagccaggctctgcctggaggatccctccatccggctcctgtcatcccctacactttggccaagcaagaggtggtagaaccacttggctgctcattccttctggaggacacacagtctcagtccagatgccttcctgtctttctggccctttctggaccagatcctactcttcctttctaaatctgagatctccctccagggaatccgcctgcagaggacagagctggctgtcttcccccacccctaacctggcttattcccaactgctctgcccactgtgaaaccactaggttctaggtcctggcttctagatctggaaccttaccacgttactgcatactgatccctttcccatgatccagaactgaggtcactgggttctagaacccccacatttacctcgaggctcttccatccccaaactgtgccctgccttcagctttggtgaaagggagggcccctcatgtgtgctgtgctgtgtctgcaccgcttggtttgcagttgagaggggagggcaggaggggtgtgattggagtgtgtccggagatgagatgaaaaaaatacatctatatttaagaa

SEQ ID NO: 608 - DNA, 2659 bp, Homo sapiens
  source 1..2659: mol_type = genomic DNA
gccagtcgctgacagccgcggcgccgcgagcttctcctctcctcacgaccgaggcaggtaaacgcccggggtgggaggaacgcgggcgggggcaggggagccgcgggggccgagtgaggaccccgggcctcgggtcccaggcgcaagggtgcccggccgggcggggtcgggaccccagtgaggaggggccgggggctgccccgcgggcgcgtgacgcgtctcgggcctgcccggctgcgctggtctccgctcgggtgaggcggcttggcttcgcttttcagagcagtcattatggcgaaccttggctgctggatgctggttctctttgtggccacatggagtgacctgggcctctgcaagaagcgcccgaagcctggaggatggaacactgggggcagccgatacccggggcagggcagccctggaggcaaccgctacccacctcagggcggtggtggctgggggcagcctcatggtggtggctgggggcagcctcatggtggtggctgggggcagccccatggtggtggctggggacagcctcatggtggtggctggggtcaaggaggtggcacccacagtcagtggaacaagccgagtaagccaaaaaccaacatgaagcacatggctggtgctgcagcagctggggcagtggtggggggccttggcggctacatgctgggaagtgccatgagcaggcccatcatacatttcggcagtgactatgaggaccgttactatcgtgaaaacatgcaccgttaccccaaccaagtgtactacaggcccatggatgagtacagcaaccagaacaactttgtgcacgactgcgtcaatatcacaatcaagcagcacacggtcaccacaaccaccaagggggagaacttcaccgagaccgacgttaagatgatggagcgcgtggttgagcagatgtgtatcacccagtacgagagggaatctcaggcctattaccagagaggatcgagcatggtcctcttctcctctccacctgtgatcctcctgatctctttcctcatcttcctgatagtgggatgaggaaggtcttcctgttttcaccatctttctaatctttttccagcttgagggaggcggtatccacctgcagcccttttagtggtggtgtctcactctttcttctctctttgtcccggataggctaatcaatacccttggcactgatgggcactggaaaacatagagtagacctgagatgctggtcaagccccctttgattgagttcatcatgagccgttgctaatgccaggccagtaaaagtataacagcaaataaccattggttaatctggacttatttttggacttagtgcaacaggttgaggctaaaacaaatctcagaacagtctgaaatacctttgcctggatacctctggctccttcagcagctagagctcagtatactaatgccctatcttagtagagatttcatagctatttagagatattttccattttaagaaaacccgacaacatttctgccaggtttgttaggaggccacatgatacttattcaaaaaaatcctagagattcttagctcttgggatgcaggctcagcccgctggagcatgagctctgtgtgtaccgagaactggggtgatgttttacttttcacagtatgggctacacagcagctgttcaacaagagtaaatattgtcacaacactgaacctctggctagaggacatattcacagtgaacataactgtaacatatatgaaaggcttctgggacttgaaatcaaatgtttgggaatggtgcccttggaggcaacctcccattttagatgtttaaaggaccctatatgtggcattcctttctttaaactataggtaattaaggcagctgaaaagtaaattgccttctagacactgaaggcaaatctcctttgtccatttacctggaaaccagaatgattttgacatacaggagagctgcagttgtgaaagcaccatcatcatagaggatgatgtaattaaaaaatggtcagtgtgcaaagaaaagaactgcttgcatttctttatttctgtctcataattgtcaaaaaccagaattaggtcaagttcatagtttctgtaattggcttttgaatcaaagaatagggagacaatctaaaaaatatcttaggttggagatgacagaaatatgattgatttgaagtggaaaaagaaattctgttaatgttaattaaagtaaaattattccctgaattgtttgatattgtcacctagcagatatgtattacttttctgcaatgttattattggcttgcactttgtgagtattctatgtaaaaatatatatgtatataaaatatatattgcataggacagacttaggagttttgtttagagcagttaacatctgaagtgtctaatgcattaacttttgtaaggtactgaatacttaatatgtgggaaacccttttgcgtggtccttaggcttacaatgtgcactgaatcgtttcatgtaagaatccaaagtggacaccattaacaggtctttgaaatatgcatgtactttatattttctatatttgtaactttgcatgttcttgttttgttatataaaaaaattgtaaatgtttaatatctgactgaaattaaacgagcgaagatgagcacca

SEQ ID NO: 609 - DNA, 2435 bp, Homo sapiens
  source 1..2435: mol_type = genomic DNA
gccagtcgctgacagccgcggcgccgcgagcttctcctctcctcacgaccgaggcagagcagtcattatggcgaaccttggctgctggatgctggttctctttgtggccacatggagtgacctgggcctctgcaagaagcgcccgaagcctggaggatggaacactgggggcagccgatacccggggcagggcagccctggaggcaaccgctacccacctcagggcggtggtggctgggggcagcctcatggtggtggctgggggcagcctcatggtggtggctgggggcagccccatggtggtggctggggacagcctcatggtggtggctggggtcaaggaggtggcacccacagtcagtggaacaagccgagtaagccaaaaaccaacatgaagcacatggctggtgctgcagcagctggggcagtggtggggggccttggcggctacatgctgggaagtgccatgagcaggcccatcatacatttcggcagtgactatgaggaccgttactatcgtgaaaacatgcaccgttaccccaaccaagtgtactacaggcccatggatgagtacagcaaccagaacaactttgtgcacgactgcgtcaatatcacaatcaagcagcacacggtcaccacaaccaccaagggggagaacttcaccgagaccgacgttaagatgatggagcgcgtggttgagcagatgtgtatcacccagtacgagagggaatctcaggcctattaccagagaggatcgagcatggtcctcttctcctctccacctgtgatcctcctgatctctttcctcatcttcctgatagtgggatgaggaaggtcttcctgttttcaccatctttctaatctttttccagcttgagggaggcggtatccacctgcagcccttttagtggtggtgtctcactctttcttctctctttgtcccggataggctaatcaatacccttggcactgatgggcactggaaaacatagagtagacctgagatgctggtcaagccccctttgattgagttcatcatgagccgttgctaatgccaggccagtaaaagtataacagcaaataaccattggttaatctggacttatttttggacttagtgcaacaggttgaggctaaaacaaatctcagaacagtctgaaatacctttgcctggatacctctggctccttcagcagctagagctcagtatactaatgccctatcttagtagagatttcatagctatttagagatattttccattttaagaaaacccgacaacatttctgccaggtttgttaggaggccacatgatacttattcaaaaaaatcctagagattcttagctcttgggatgcaggctcagcccgctggagcatgagctctgtgtgtaccgagaactggggtgatgttttacttttcacagtatgggctacacagcagctgttcaacaagagtaaatattgtcacaacactgaacctctggctagaggacatattcacagtgaacataactgtaacatatatgaaaggcttctgggacttgaaatcaaatgtttgggaatggtgcccttggaggcaacctcccattttagatgtttaaaggaccctatatgtggcattcctttctttaaactataggtaattaaggcagctgaaaagtaaattgccttctagacactgaaggcaaatctcctttgtccatttacctggaaaccagaatgattttgacatacaggagagctgcagttgtgaaagcaccatcatcatagaggatgatgtaattaaaaaatggtcagtgtgcaaagaaaagaactgcttgcatttctttatttctgtctcataattgtcaaaaaccagaattaggtcaagttcatagtttctgtaattggcttttgaatcaaagaatagggagacaatctaaaaaatatcttaggttggagatgacagaaatatgattgatttgaagtggaaaaagaaattctgttaatgttaattaaagtaaaattattccctgaattgtttgatattgtcacctagcagatatgtattacttttctgcaatgttattattggcttgcactttgtgagtattctatgtaaaaatatatatgtatataaaatatatattgcataggacagacttaggagttttgtttagagcagttaacatctgaagtgtctaatgcattaacttttgtaaggtactgaatacttaatatgtgggaaacccttttgcgtggtccttaggcttacaatgtgcactgaatcgtttcatgtaagaatccaaagtggacaccattaacaggtctttgaaatatgcatgtactttatattttctatatttgtaactttgcatgttcttgttttgttatataaaaaaattgtaaatgtttaatatctgactgaaattaaacgagcgaagatgagcacca

SEQ ID NO: 610 - DNA, 2430 bp, Homo sapiens
  source 1..2430: mol_type = genomic DNA
gccagtcgctgacagccgcggcgccgcgagcttctcctctcctcacgaccgaggcagtcattatggcgaaccttggctgctggatgctggttctctttgtggccacatggagtgacctgggcctctgcaagaagcgcccgaagcctggaggatggaacactgggggcagccgatacccggggcagggcagccctggaggcaaccgctacccacctcagggcggtggtggctgggggcagcctcatggtggtggctgggggcagcctcatggtggtggctgggggcagccccatggtggtggctggggacagcctcatggtggtggctggggtcaaggaggtggcacccacagtcagtggaacaagccgagtaagccaaaaaccaacatgaagcacatggctggtgctgcagcagctggggcagtggtggggggccttggcggctacatgctgggaagtgccatgagcaggcccatcatacatttcggcagtgactatgaggaccgttactatcgtgaaaacatgcaccgttaccccaaccaagtgtactacaggcccatggatgagtacagcaaccagaacaactttgtgcacgactgcgtcaatatcacaatcaagcagcacacggtcaccacaaccaccaagggggagaacttcaccgagaccgacgttaagatgatggagcgcgtggttgagcagatgtgtatcacccagtacgagagggaatctcaggcctattaccagagaggatcgagcatggtcctcttctcctctccacctgtgatcctcctgatctctttcctcatcttcctgatagtgggatgaggaaggtcttcctgttttcaccatctttctaatctttttccagcttgagggaggcggtatccacctgcagcccttttagtggtggtgtctcactctttcttctctctttgtcccggataggctaatcaatacccttggcactgatgggcactggaaaacatagagtagacctgagatgctggtcaagccccctttgattgagttcatcatgagccgttgctaatgccaggccagtaaaagtataacagcaaataaccattggttaatctggacttatttttggacttagtgcaacaggttgaggctaaaacaaatctcagaacagtctgaaatacctttgcctggatacctctggctccttcagcagctagagctcagtatactaatgccctatcttagtagagatttcatagctatttagagatattttccattttaagaaaacccgacaacatttctgccaggtttgttaggaggccacatgatacttattcaaaaaaatcctagagattcttagctcttgggatgcaggctcagcccgctggagcatgagctctgtgtgtaccgagaactggggtgatgttttacttttcacagtatgggctacacagcagctgttcaacaagagtaaatattgtcacaacactgaacctctggctagaggacatattcacagtgaacataactgtaacatatatgaaaggcttctgggacttgaaatcaaatgtttgggaatggtgcccttggaggcaacctcccattttagatgtttaaaggaccctatatgtggcattcctttctttaaactataggtaattaaggcagctgaaaagtaaattgccttctagacactgaaggcaaatctcctttgtccatttacctggaaaccagaatgattttgacatacaggagagctgcagttgtgaaagcaccatcatcatagaggatgatgtaattaaaaaatggtcagtgtgcaaagaaaagaactgcttgcatttctttatttctgtctcataattgtcaaaaaccagaattaggtcaagttcatagtttctgtaattggcttttgaatcaaagaatagggagacaatctaaaaaatatcttaggttggagatgacagaaatatgattgatttgaagtggaaaaagaaattctgttaatgttaattaaagtaaaattattccctgaattgtttgatattgtcacctagcagatatgtattacttttctgcaatgttattattggcttgcactttgtgagtattctatgtaaaaatatatatgtatataaaatatatattgcataggacagacttaggagttttgtttagagcagttaacatctgaagtgtctaatgcattaacttttgtaaggtactgaatacttaatatgtgggaaacccttttgcgtggtccttaggcttacaatgtgcactgaatcgtttcatgtaagaatccaaagtggacaccattaacaggtctttgaaatatgcatgtactttatattttctatatttgtaactttgcatgttcttgttttgttatataaaaaaattgtaaatgtttaatatctgactgaaattaaacgagcgaagatgagcacca

SEQ ID NO: 611 - DNA, 2431 bp, Homo sapiens
  source 1..2431: mol_type = genomic DNA
gccagtcgctgacagccgcggcgccgcgagcttctcctctcctcacgaccgagagcagtcattatggcgaaccttggctgctggatgctggttctctttgtggccacatggagtgacctgggcctctgcaagaagcgcccgaagcctggaggatggaacactgggggcagccgatacccggggcagggcagccctggaggcaaccgctacccacctcagggcggtggtggctgggggcagcctcatggtggtggctgggggcagcctcatggtggtggctgggggcagccccatggtggtggctggggacagcctcatggtggtggctggggtcaaggaggtggcacccacagtcagtggaacaagccgagtaagccaaaaaccaacatgaagcacatggctggtgctgcagcagctggggcagtggtggggggccttggcggctacatgctgggaagtgccatgagcaggcccatcatacatttcggcagtgactatgaggaccgttactatcgtgaaaacatgcaccgttaccccaaccaagtgtactacaggcccatggatgagtacagcaaccagaacaactttgtgcacgactgcgtcaatatcacaatcaagcagcacacggtcaccacaaccaccaagggggagaacttcaccgagaccgacgttaagatgatggagcgcgtggttgagcagatgtgtatcacccagtacgagagggaatctcaggcctattaccagagaggatcgagcatggtcctcttctcctctccacctgtgatcctcctgatctctttcctcatcttcctgatagtgggatgaggaaggtcttcctgttttcaccatctttctaatctttttccagcttgagggaggcggtatccacctgcagcccttttagtggtggtgtctcactctttcttctctctttgtcccggataggctaatcaatacccttggcactgatgggcactggaaaacatagagtagacctgagatgctggtcaagccccctttgattgagttcatcatgagccgttgctaatgccaggccagtaaaagtataacagcaaataaccattggttaatctggacttatttttggacttagtgcaacaggttgaggctaaaacaaatctcagaacagtctgaaatacctttgcctggatacctctggctccttcagcagctagagctcagtatactaatgccctatcttagtagagatttcatagctatttagagatattttccattttaagaaaacccgacaacatttctgccaggtttgttaggaggccacatgatacttattcaaaaaaatcctagagattcttagctcttgggatgcaggctcagcccgctggagcatgagctctgtgtgtaccgagaactggggtgatgttttacttttcacagtatgggctacacagcagctgttcaacaagagtaaatattgtcacaacactgaacctctggctagaggacatattcacagtgaacataactgtaacatatatgaaaggcttctgggacttgaaatcaaatgtttgggaatggtgcccttggaggcaacctcccattttagatgtttaaaggaccctatatgtggcattcctttctttaaactataggtaattaaggcagctgaaaagtaaattgccttctagacactgaaggcaaatctcctttgtccatttacctggaaaccagaatgattttgacatacaggagagctgcagttgtgaaagcaccatcatcatagaggatgatgtaattaaaaaatggtcagtgtgcaaagaaaagaactgcttgcatttctttatttctgtctcataattgtcaaaaaccagaattaggtcaagttcatagtttctgtaattggcttttgaatcaaagaatagggagacaatctaaaaaatatcttaggttggagatgacagaaatatgattgatttgaagtggaaaaagaaattctgttaatgttaattaaagtaaaattattccctgaattgtttgatattgtcacctagcagatatgtattacttttctgcaatgttattattggcttgcactttgtgagtattctatgtaaaaatatatatgtatataaaatatatattgcataggacagacttaggagttttgtttagagcagttaacatctgaagtgtctaatgcattaacttttgtaaggtactgaatacttaatatgtgggaaacccttttgcgtggtccttaggcttacaatgtgcactgaatcgtttcatgtaagaatccaaagtggacaccattaacaggtctttgaaatatgcatgtactttatattttctatatttgtaactttgcatgttcttgttttgttatataaaaaaattgtaaatgtttaatatctgactgaaattaaacgagcgaagatgagcacca

SEQ ID NO: 612 - DNA, 2361 bp, Homo sapiens
  source 1..2361: mol_type = genomic DNA
accttggctgctggatgctggttctctttgtggccacatggagtgacctgggcctctgcaagaagcgcccgaagcctggaggatggaacactgggggcagccgatacccggggcagggcagccctggaggcaaccgctacccacctcagggcggtggtggctgggggcagcctcatggtggtggctgggggcagcctcatggtggtggctgggggcagccccatggtggtggctggggacagcctcatggtggtggctggggtcaaggaggtggcacccacagtcagtggaacaagccgagtaagccaaaaaccaacatgaagcacatggctggtgctgcagcagctggggcagtggtggggggccttggcggctacatgctgggaagtgccatgagcaggcccatcatacatttcggcagtgactatgaggaccgttactatcgtgaaaacatgcaccgttaccccaaccaagtgtactacaggcccatggatgagtacagcaaccagaacaactttgtgcacgactgcgtcaatatcacaatcaagcagcacacggtcaccacaaccaccaagggggagaacttcaccgagaccgacgttaagatgatggagcgcgtggttgagcagatgtgtatcacccagtacgagagggaatctcaggcctattaccagagaggatcgagcatggtcctcttctcctctccacctgtgatcctcctgatctctttcctcatcttcctgatagtgggatgaggaaggtcttcctgttttcaccatctttctaatctttttccagcttgagggaggcggtatccacctgcagcccttttagtggtggtgtctcactctttcttctctctttgtcccggataggctaatcaatacccttggcactgatgggcactggaaaacatagagtagacctgagatgctggtcaagccccctttgattgagttcatcatgagccgttgctaatgccaggccagtaaaagtataacagcaaataaccattggttaatctggacttatttttggacttagtgcaacaggttgaggctaaaacaaatctcagaacagtctgaaatacctttgcctggatacctctggctccttcagcagctagagctcagtatactaatgccctatcttagtagagatttcatagctatttagagatattttccattttaagaaaacccgacaacatttctgccaggtttgttaggaggccacatgatacttattcaaaaaaatcctagagattcttagctcttgggatgcaggctcagcccgctggagcatgagctctgtgtgtaccgagaactggggtgatgttttacttttcacagtatgggctacacagcagctgttcaacaagagtaaatattgtcacaacactgaacctctggctagaggacatattcacagtgaacataactgtaacatatatgaaaggcttctgggacttgaaatcaaatgtttgggaatggtgcccttggaggcaacctcccattttagatgtttaaaggaccctatatgtggcattcctttctttaaactataggtaattaaggcagctgaaaagtaaattgccttctagacactgaaggcaaatctcctttgtccatttacctggaaaccagaatgattttgacatacaggagagctgcagttgtgaaagcaccatcatcatagaggatgatgtaattaaaaaatggtcagtgtgcaaagaaaagaactgcttgcatttctttatttctgtctcataattgtcaaaaaccagaattaggtcaagttcatagtttctgtaattggcttttgaatcaaagaatagggagacaatctaaaaaatatcttaggttggagatgacagaaatatgattgatttgaagtggaaaaagaaattctgttaatgttaattaaagtaaaattattccctgaattgtttgatattgtcacctagcagatatgtattacttttctgcaatgttattattggcttgcactttgtgagtattctatgtaaaaatatatatgtatataaaatatatattgcataggacagacttaggagttttgtttagagcagttaacatctgaagtgtctaatgcattaacttttgtaaggtactgaatacttaatatgtgggaaacccttttgcgtggtccttaggcttacaatgtgcactgaatcgtttcatgtaagaatccaaagtggacaccattaacaggtctttgaaatatgcatgtactttatattttctatatttgtaactttgcatgttcttgttttgttatataaaaaaattgtaaatgtttaatatctgactgaaattaaacgagcgaagatgagcacca

SEQ ID NO: 613 - DNA, 2426 bp, Homo sapiens
  source 1..2426: mol_type = genomic DNA
gccagtcgctgacagccgcggcgccgcgagcttctcctctcctcacgaccgagtcattatggcgaaccttggctgctggatgctggttctctttgtggccacatggagtgacctgggcctctgcaagaagcgcccgaagcctggaggatggaacactgggggcagccgatacccggggcagggcagccctggaggcaaccgctacccacctcagggcggtggtggctgggggcagcctcatggtggtggctgggggcagcctcatggtggtggctgggggcagccccatggtggtggctggggacagcctcatggtggtggctggggtcaaggaggtggcacccacagtcagtggaacaagccgagtaagccaaaaaccaacatgaagcacatggctggtgctgcagcagctggggcagtggtggggggccttggcggctacatgctgggaagtgccatgagcaggcccatcatacatttcggcagtgactatgaggaccgttactatcgtgaaaacatgcaccgttaccccaaccaagtgtactacaggcccatggatgagtacagcaaccagaacaactttgtgcacgactgcgtcaatatcacaatcaagcagcacacggtcaccacaaccaccaagggggagaacttcaccgagaccgacgttaagatgatggagcgcgtggttgagcagatgtgtatcacccagtacgagagggaatctcaggcctattaccagagaggatcgagcatggtcctcttctcctctccacctgtgatcctcctgatctctttcctcatcttcctgatagtgggatgaggaaggtcttcctgttttcaccatctttctaatctttttccagcttgagggaggcggtatccacctgcagcccttttagtggtggtgtctcactctttcttctctctttgtcccggataggctaatcaatacccttggcactgatgggcactggaaaacatagagtagacctgagatgctggtcaagccccctttgattgagttcatcatgagccgttgctaatgccaggccagtaaaagtataacagcaaataaccattggttaatctggacttatttttggacttagtgcaacaggttgaggctaaaacaaatctcagaacagtctgaaatacctttgcctggatacctctggctccttcagcagctagagctcagtatactaatgccctatcttagtagagatttcatagctatttagagatattttccattttaagaaaacccgacaacatttctgccaggtttgttaggaggccacatgatacttattcaaaaaaatcctagagattcttagctcttgggatgcaggctcagcccgctggagcatgagctctgtgtgtaccgagaactggggtgatgttttacttttcacagtatgggctacacagcagctgttcaacaagagtaaatattgtcacaacactgaacctctggctagaggacatattcacagtgaacataactgtaacatatatgaaaggcttctgggacttgaaatcaaatgtttgggaatggtgcccttggaggcaacctcccattttagatgtttaaaggaccctatatgtggcattcctttctttaaactataggtaattaaggcagctgaaaagtaaattgccttctagacactgaaggcaaatctcctttgtccatttacctggaaaccagaatgattttgacatacaggagagctgcagttgtgaaagcaccatcatcatagaggatgatgtaattaaaaaatggtcagtgtgcaaagaaaagaactgcttgcatttctttatttctgtctcataattgtcaaaaaccagaattaggtcaagttcatagtttctgtaattggcttttgaatcaaagaatagggagacaatctaaaaaatatcttaggttggagatgacagaaatatgattgatttgaagtggaaaaagaaattctgttaatgttaattaaagtaaaattattccctgaattgtttgatattgtcacctagcagatatgtattacttttctgcaatgttattattggcttgcactttgtgagtattctatgtaaaaatatatatgtatataaaatatatattgcataggacagacttaggagttttgtttagagcagttaacatctgaagtgtctaatgcattaacttttgtaaggtactgaatacttaatatgtgggaaacccttttgcgtggtccttaggcttacaatgtgcactgaatcgtttcatgtaagaatccaaagtggacaccattaacaggtctttgaaatatgcatgtactttatattttctatatttgtaactttgcatgttcttgttttgttatataaaaaaattgtaaatgtttaatatctgactgaaattaaacgagcgaagatgagcacca

SEQ ID NO: 614 - DNA, 5501 bp, Homo sapiens
  source 1..5501: mol_type = genomic DNA
agagccagagcaggatggagaggagacgcatcacctccgctgctcgccgctcctacgtctcctcaggggagatgatggtggggggcctggctcctggccgccgtctgggtcctggcacccgcctctccctggctcgaatgccccctccactcccgacccgggtggatttctccctggctggggcactcaatgctggcttcaaggagacccgggccagtgagcgggcagagatgatggagctcaatgaccgctttgccagctacatcgagaaggttcgcttcctggaacagcaaaacaaggcgctggctgctgagctgaaccagctgcgggccaaggagcccaccaagctggcagacgtctaccaggctgagctgcgagagctgcggctgcggctcgatcaactcaccgccaacagcgcccggctggaggttgagagggacaatctggcacaggacctggccactgtgaggcagaagctccaggatgaaaccaacctgaggctggaagccgagaacaacctggctgcctatagacaggaagcagatgaagccaccctggcccgtctggatctggagaggaagattgagtcgctggaggaggagatccggttcttgaggaagatccacgaggaggaggttcgggaactccaggagcagctggcccgacagcaggtccatgtggagcttgacgtggccaagccagacctcaccgcagccctgaaagagatccgcacgcagtatgaggcaatggcgtccagcaacatgcatgaagccgaagagtggtaccgctccaagtttgcagacctgacagacgctgctgcccgcaacgcggagctgctccgccaggccaagcacgaagccaacgactaccggcgccagttgcagtccttgacctgcgacctggagtctctgcgcggcacgaacgagtccctggagaggcagatgcgcgagcaggaggagcggcacgtgcgggaggcggccagttatcaggaggcgctggcgcggctggaggaagaggggcagagcctcaaggacgagatggcccgccacttgcaggagtaccaggacctgctcaatgtcaagctggccctggacatcgagatcgccacctacaggaagctgctagagggcgaggagaaccggatcaccattcccgtgcagaccttctccaacctgcagattcgagaaaccagcctggacaccaagtctgtgtcagaaggccacctcaagaggaacatcgtggtgaagaccgtggagatgcgggatggagaggtcattaaggagtccaagcaggagcacaaggatgtgatgtgaggcaggacccacctggtggcctctgccccgtctcatgaggggcccgagcagaagcaggatagttgctccgcctctgctggcacatttccccagacctgagctccccaccaccccagctgctcccctccctcctctgtccctaggtcagcttgctgccctaggctccgtcagtatcaggcctgccagacggcacccacccagcacccagcaactccaactaacaagaaactcacccccaaggggcagtctggaggggcatggccagcagcttgcgttagaatgaggaggaaggagagaaggggaggagggcggggggcacctactacatcgccctccacatccctgattcctgttgttatggaaactgttgccagagatggaggttctctcggagtatctgggaactgtgcctttgagtttcctcaggctgctggaggaaaactgagactcagacaggaaagggaaggccccacagacaaggtagccctggccagaggcttgttttgtcttttggtttttatgaggtgggatatccctatgctgcctaggctgaccttgaactcctgggctcaagcagtctacccacctcagcctcctgtgtagctgggattatagattggagccaccatgcccagctcagagggttgttctcctagactgaccctgatcagtctaagatgggtggggacgtcctgccacctggggcagtcacctgcccagatcccagaaggacctcctgagcgatgactcaagtgtctcagtccacctgagctgccatccagggatgccatctgtgggcacgctgtgggcaggtgggagcttgattctcagcacttgggggatctgttgtgtacgtggagagggatgaggtgctgggagggatagaggggggctgcctggcccccagctgtgggtacagagaggtcaagcccaggaggactgccccgtgcagactggaggggacgctggtagagatggaggaggaggcaattgggatggcgctaggcatacaagtaggggttgtgggtgaccagttgcacttggcctctggattgtgggaattaaggaagtgactcatcctcttgaagatgctgaaacaggagagaaaggggatgtatccatgggggcagggcatgactttgtcccatttctaaaggcctcttccttgctgtgtcataccaggccgccccagcctctgagcccctgggactgctgcttcttaaccccagtaagccactgccacacgtctgaccctctccaccccatagtgaccggctgcttttccctaagccaagggcctcttgcggtcccttcttactcacacacaaaatgtacccagtattctaggtagtgccctattttacaattgtaaaactgaggcacgagcaaagtgaagacactggctcatattcctgcagcctggaggccgggtgctcagggctgacacgtccaccccagtgcacccactctgctttgactgagcagactggtgagcagactggtgggatctgtgcccagagatgggactgggagggcccacttcagggttctcctctcccctctaaggccgaagaagggtccttccctctccccaagacttggtgtcctttccctccactccttcctgccacctgctgctgctgctgctgctaatcttcagggcactgctgctgcctttagtcgctgaggaaaaataaagacaaatgctgcgcccttccccagagtggactctgatctgttcatgagagggcgggactggggccaagatgtagcctttgacaagaccaactcatttcttattactgatcatctctggggcccatgccctcaccaaattccacccgcagccaaagaggacatacaccagctccctccactcttttcttccttcctctccctgctacctgcaactcaaccagcacaatcttcataggcaagaaagcaaagcagctcaaacatgattcaacactgatcagtgtttaccactggataaatctgagttcacactttccttctctgacctaaatgtgaagtcaggaaacacatgtgccctacttccatcctgagctcagtccccaatctcccaccagcctcaggcccctccacttctcagatcaggtcccagacctgcccatgaaaatggggagcaggctgtaacagatttgtccacatgttcctaccacctgtcccaacccagggtacccacccagagacatctggtatcatttaacaaacacattgaaggacaactggtcttcagagctgaagagagctcctagggggagaagctgggacaacagtgaaataagtagcagcagcaacgacagaagtgaatggtgacaaagactgctgtgatgagcaggtagcctatcagggtgagctccacagccgagcgagtctcaggatctgagaacgaggctgggtagtgcccatgagatgtcacacccagccggaagccagcaactagcacaccctgcctccagcaatagtagatgccccggtcatccagctgggtgaagcggatgtggagctggttgccgtggtcaatgaacaccctcatggacctgttgacacccttcaggtactgtgtgcggtagaggtgctggcggtctttgtcccaggccactgcatgctctggccgggccccaggacaggagatgatgagtccatggcccagtctctgctggtggaactgaatgggcacctggggcacccagggccggctgcccactttggacacatagttaatgatggccagcacgccctcccggatggtctttgtcttctcacagggtactaagcagctccgaaccagcacctcaggcgtgtggtccctggccttggtccgcagcttccttggcacagcccttgagccacaagacaccacatcgggcacggccttgaggtagcgtggggagaggtctgggctctgcaggtagcagaggccgatgcgccactgctccccacgcactccgcagcggtcacagggggtccattcccagaaggtggtgaagacatggaggtgcccatagtattcatctgcaaagggctcctggcccttgtcctggaaagtggccaccattccctcactgttctggatgtccacatcgtaggcgtaaaagtagtcccccttgcgggtgccgcagaagtacaggcctgagtcctcagactgagccctgaaaaccaacaagctgaacatgcggatgctgaagcgggtcagcatgtcgctgcccacacgtacctgggctgcctccgtcagcacccgcccatcaaagtccgtcagcactttggtgtggctgctacctaggtgcttttggtagaaccagactacagctggcacctcttcgggtttgcagtgacagggaagctcaaagctcatgtcggccaggtaggctgcattttcaaacatcaggaaagcagggcagggggtcctctgaaaaatgttttccttctccacaatttcaaaggcctggagcccccatgcccacaggagcacagtggtgagggccaggtgcatacctgaaggaggcaggggtcagaggggcagggcaaaaccagggcattaaaggctcatagggctcctagaaagctctgctaagcggaagcctctagatgaggaaaggattatgcagccaggaaaagcagcaacaatctgcagaggaagccgccaagtgcaaggcaatttattcccagtggatgtacaagatgcccttctaacattccagacctgatctcagggtggggggggaaagccattctagaacctggcctttactcccctttctagaacactggcgctcacccaagaatgggtcaaaggaaaccggaatgagaagggcgggccgaggtgctcgggcagggagatctctgcctcagtgctccaggccctgccctgccagcctggtggaaaagtctttcatcaacctgggggatgaaggaaacccaccctcctgcatatctggccatccgggaggctggctggacctgagctgatggcttgggactttcccaggcccaacctgcacaagaactgagtctctaggggaaaattcaacacctcaaatgatgtagtatttgatcatttgttgattacatgtccattcattggtttggggctataaacattcttgttaagagctgtggagatcagtgtttgtttaccataaagattttgctttttccctttta

SEQ ID NO: 615 - DNA, 3154 bp, Homo sapiens
  source 1..3154: mol_type = genomic DNA
agagccagagcaggatggagaggagacgcatcacctccgctgctcgccgctcctacgtctcctcaggggagatgatggtggggggcctggctcctggccgccgtctgggtcctggcacccgcctctccctggctcgaatgccccctccactcccgacccgggtggatttctccctggctggggcactcaatgctggcttcaaggagacccgggccagtgagcgggcagagatgatggagctcaatgaccgctttgccagctacatcgagaaggttcgcttcctggaacagcaaaacaaggcgctggctgctgagctgaaccagctgcgggccaaggagcccaccaagctggcagacgtctaccaggctgagctgcgagagctgcggctgcggctcgatcaactcaccgccaacagcgcccggctggaggttgagagggacaatctggcacaggacctggccactgtgaggcagaagctccaggatgaaaccaacctgaggctggaagccgagaacaacctggctgcctatagacaggaagcagatgaagccaccctggcccgtctggatctggagaggaagattgagtcgctggaggaggagatccggttcttgaggaagatccacgaggaggaggttcgggaactccaggagcagctggcccgacagcaggtccatgtggagcttgacgtggccaagccagacctcaccgcagccctgaaagagatccgcacgcagtatgaggcaatggcgtccagcaacatgcatgaagccgaagagtggtaccgctccaagtttgcagacctgacagacgctgctgcccgcaacgcggagctgctccgccaggccaagcacgaagccaacgactaccggcgccagttgcagtccttgacctgcgacctggagtctctgcgcggcacgaacgagtccctggagaggcagatgcgcgagcaggaggagcggcacgtgcgggaggcggccagttatcaggaggcgctggcgcggctggaggaagaggggcagagcctcaaggacgagatggcccgccacttgcaggagtaccaggacctgctcaatgtcaagctggccctggacatcgagatcgccacctacaggaagctgctagagggcgaggagaaccggatcaccattcccgtgcagaccttctccaacctgcagattcgagggggcaaaagcaccaaagacggggaaaatcacaaggtcacaagatatctcaaaagcctcacaatacgagttataccaatacaggctcaccagattgtaaatggaacgccgccggctcgcgaaaccagcctggacaccaagtctgtgtcagaaggccacctcaagaggaacatcgtggtgaagaccgtggagatgcgggatggagaggtcattaaggagtccaagcaggagcacaaggatgtgatgtgaggcaggacccacctggtggcctctgccccgtctcatgaggggcccgagcagaagcaggatagttgctccgcctctgctggcacatttccccagacctgagctccccaccaccccagctgctcccctccctcctctgtccctaggtcagcttgctgccctaggctccgtcagtatcaggcctgccagacggcacccacccagcacccagcaactccaactaacaagaaactcacccccaaggggcagtctggaggggcatggccagcagcttgcgttagaatgaggaggaaggagagaaggggaggagggcggggggcacctactacatcgccctccacatccctgattcctgttgttatggaaactgttgccagagatggaggttctctcggagtatctgggaactgtgcctttgagtttcctcaggctgctggaggaaaactgagactcagacaggaaagggaaggccccacagacaaggtagccctggccagaggcttgttttgtcttttggtttttatgaggtgggatatccctatgctgcctaggctgaccttgaactcctgggctcaagcagtctacccacctcagcctcctgtgtagctgggattatagattggagccaccatgcccagctcagagggttgttctcctagactgaccctgatcagtctaagatgggtggggacgtcctgccacctggggcagtcacctgcccagatcccagaaggacctcctgagcgatgactcaagtgtctcagtccacctgagctgccatccagggatgccatctgtgggcacgctgtgggcaggtgggagcttgattctcagcacttgggggatctgttgtgtacgtggagagggatgaggtgctgggagggatagaggggggctgcctggcccccagctgtgggtacagagaggtcaagcccaggaggactgccccgtgcagactggaggggacgctggtagagatggaggaggaggcaattgggatggcgctaggcatacaagtaggggttgtgggtgaccagttgcacttggcctctggattgtgggaattaaggaagtgactcatcctcttgaagatgctgaaacaggagagaaaggggatgtatccatgggggcagggcatgactttgtcccatttctaaaggcctcttccttgctgtgtcataccaggccgccccagcctctgagcccctgggactgctgcttcttaaccccagtaagccactgccacacgtctgaccctctccaccccatagtgaccggctgcttttccctaagccaagggcctcttgcggtcccttcttactcacacacaaaatgtacccagtattctaggtagtgccctattttacaattgtaaaactgaggcacgagcaaagtgaagacactggctcatattcctgcagcctggaggccgggtgctcagggctgacacgtccaccccagtgcacccactctgctttgactgagcagactggtgagcagactggtgggatctgtgcccagagatgggactgggagggcccacttcagggttctcctctcccctctaaggccgaagaagggtccttccctctccccaagacttggtgtcctttccctccactccttcctgccacctgctgctgctgctgctgctaatcttcagggcactgctgctgcctttagtcgctgaggaaaaataaagacaaatgctgcgcccttcccca

SEQ ID NO: 616 - DNA, 1774 bp, Homo sapiens
  source 1..1774: mol_type = genomic DNA
agagccagagcaggatggagaggagacgcatcacctccgctgctcgccgctcctacgtctcctcaggggagatgatggtggggggcctggctcctggccgccgtctgggtcctggcacccgcctctccctggctcgaatgccccctccactcccgacccgggtggatttctccctggctggggcactcaatgctggcttcaaggagacccgggccagtgagcgggcagagatgatggagctcaatgaccgctttgccagctacatcgagaaggttcgcttcctggaacagcaaaacaaggcgctggctgctgagctgaaccagctgcgggccaaggagcccaccaagctggcagacgtctaccaggctgagctgcgagagctgcggctgcggctcgatcaactcaccgccaacagcgcccggctggaggttgagagggacaatctggcacaggacctggccactgtgaggcagaagctccaggatgaaaccaacctgaggctggaagccgagaacaacctggctgcctatagacaggaagcagatgaagccaccctggcccgtctggatctggagaggaagattgagtcgctggaggaggagatccggttcttgaggaagatccacgaggaggaggttcgggaactccaggagcagctggcccgacagcaggtccatgtggagcttgacgtggccaagccagacctcaccgcagccctgaaagagatccgcacgcagtatgaggcaatggcgtccagcaacatgcatgaagccgaagagtggtaccgctccaagtttgcagacctgacagacgctgctgcccgcaacgcggagctgctccgccaggccaagcacgaagccaacgactaccggcgccagttgcagtccttgacctgcgacctggagtctctgcgcggcacgaacgagtccctggagaggcagatgcgcgagcaggaggagcggcacgtgcgggaggcggccagttatcaggaggcgctggcgcggctggaggaagaggggcagagcctcaaggacgagatggcccgccacttgcaggagtaccaggacctgctcaatgtcaagctggccctggacatcgagatcgccacctacaggaagctgctagagggcgaggagaaccggatcaccattcccgtgcagaccttctccaacctgcagattcgagggggcaaaagcaccaaagacggggaaaatcacaaggtcacaagatatctcaaaagcctcacaatacgagttataccaatacaggctcaccagattgtaaatggaacgccgccggctcgcggttagctgcctgcctctcagacacggcgctttgcccagcttgacagggagtgagcctcacccaccccatcctcccaatccccctgagttccctcttcccaggcttcccctaaagggcctggactgcgtcattttcccaggaactgcagtgcccagcccaggacgtggtacagagtaactgtacattaaactggcagagcttgttagtggtaaaggtggtgagtccttgggtgcgcagtggagctgctctggggcctctgagcaagcagcagcctctgtctcacctcttcctgtcactgggagggccccttgggtctcgctgtgcctggacgccaggctctctgctttattctttcatccctgaggctccatcgctcagctcagtgctgactcagttcagaggattcttccctcaggaccgcagctcttgcagtgaataaagttttatgttccctgctcttaatgttaaa

SEQ ID NO: 617 - DNA, 2128 bp, Homo sapiens
  source 1..2128: mol_type = genomic DNA
agagccagagcaggatggagaggagacgcatcacctccgctgctcgccgctcctacgtctcctcaggggagatgatggtggggggcctggctcctggccgccgtctgggtcctggcacccgcctctccctggctcgaatgccccctccactcccgacccgggtggatttctccctggctggggcactcaatgctggcttcaaggagacccgggccagtgagcgggcagagatgatggagctcaatgaccgctttgccagctacatcgagaaggttcgcttcctggaacagcaaaacaaggcgctggctgctgagctgaaccagctgcgggccaaggagcccaccaagctggcagacgtctaccaggctgagctgcgagagctgcggctgcggctcgatcaactcaccgccaacagcgcccggctggaggttgagagggacaatctggcacaggacctggccactgtgaggcagaagctccaggatgaaaccaacctgaggctggaagccgagaacaacctggctgcctatagacaggaagcagatgaagccaccctggcccgtctggatctggagaggaagattgagtcgctggaggaggagatccggttcttgaggaagatccacgaggaggaggttcgggaactccaggagcagctggcccgacagcaggtccatgtggagcttgacgtggccaagccagacctcaccgcagccctgaaagagatccgcacgcagtatgaggcaatggcgtccagcaacatgcatgaagccgaagagtggtaccgctccaagtttgcagacctgacagacgctgctgcccgcaacgcggagctgctccgccaggccaagcacgaagccaacgactaccggcgccagttgcagtccttgacctgcgacctggagtctctgcgcggcacgaacgagtccctggagaggcagatgcgcgagcaggaggagcggcacgtgcgggaggcggccagttatcaggaggcgctggcgcggctggaggaagaggggcagagcctcaaggacgagatggcccgccacttgcaggagtaccaggacctgctcaatgtcaagctggccctggacatcgagatcgccacctacaggaagctgctagagggcgaggagaaccggatcaccattcccgtgcagaccttctccaacctgcagattcgaggtcagtacagcagggcctcgtgggaagggcactggagtcctgccccctcctccagggcctgtaggttgctccagactgggactgaggatcagggcaaagggatccagctctccctgggggccttcgtgacactgcagcgctcctagccagagcctatcataccagggtacttctaggtggggcttgcagctgcccctgtcctgctaggccctggtccctcttcccctccctgcaccccattcgacagcagaactgggtgagagcttgacatctgccctgtctgcagatccctgagcaagcactgcccttctgagtgttttctgtttttgtttttttaactgcttgtcactacagggggcaaaagcaccaaagacggggaaaatcacaaggtcacaagatatctcaaaagcctcacaatacgagttataccaatacaggctcaccagattgtaaatggaacgccgccggctcgcggttagctgcctgcctctcagacacggcgctttgcccagcttgacagggagtgagcctcacccaccccatcctcccaatccccctgagttccctcttcccaggcttcccctaaagggcctggactgcgtcattttcccaggaactgcagtgcccagcccaggacgtggtacagagtaactgtacattaaactggcagagcttgttagtggtaaaggtggtgagtccttgggtgcgcagtggagctgctctggggcctctgagcaagcagcagcctctgtctcacctcttcctgtcactgggagggccccttgggtctcgctgtgcctggacgccaggctctctgctttattctttcatccctgaggctccatcgctcagctcagtgctgactcagttcagaggattcttccctcaggaccgcagctcttgcagtgaataaagttttatgttccctgctcttaatgttaaa

SEQ ID NO: 618 - DNA, 3085 bp, Homo sapiens
  source 1..3085: mol_type = genomic DNA
ggcgcgtgcgtacgcgacggcggttggcggcgcgcgggcagcgtgaagcgaggcgaggcaaggcttttcggacccacggagcgacagagcgagcggcccctacggccgtcggcggcccggcggcccgagatgttatctgggaagaaggcggcagccgcggcggcggcggctgcagcggcagcaaccgggacggaggctggccctgggacagcaggcggctccgagaacgggtctgaggtggccgcgcagcccgcgggcctgtcgggcccagccgaggtcgggccgggggcggtgggggagcgcacaccccgcaagaaagagcctccgcgggcctcgccccccgggggcctggcggaaccgccggggtccgcagggcctcaggccggccctactgtcgtgcctgggtctgcgacccccatggaaactggaatagcagagactccggaggggcgtcggaccagccggcgcaagcgggcgaaggtagagtacagagagatggatgaaagcttggccaacctctcagaagatgagtattattcagaagaagagagaaatgccaaagcagagaaggaaaagaagcttcccccaccaccccctcaagccccacctgaggaagaaaatgaaagtgagcctgaagaaccatcggggcaagcaggaggacttcaagacgacagttctggagggtatggagacggccaagcatcaggtgtggagggcgcagctttccagagccgacttcctcatgaccggatgacttctcaagaagcagcctgttttccagatattatcagtggaccacaacagacccagaaggtttttcttttcattagaaaccgcacactgcagttgtggttggataatccaaagattcagctgacatttgaggctactctccaacaattagaagcaccttataacagtgatactgtgcttgtccaccgagttcacagttatttagagcgtcatggtcttatcaacttcggcatctataagaggataaaacccctaccaactaaaaagacaggaaaggtaattattataggctctggggtctcaggcttggcagcagctcgacagttacaaagttttggaatggatgtcacacttttggaagccagggatcgtgtgggtggacgagttgccacatttcgcaaaggaaactatgtagctgatcttggagccatggtggtaacaggtcttggagggaatcctatggctgtggtcagcaaacaagtaaatatggaactggccaagatcaagcaaaaatgcccactttatgaagccaacggacaagctgacactgtcaaggttcctaaagagaaagatgaaatggtagagcaagagtttaaccggttgctagaagctacatcttaccttagtcatcaactagacttcaatgtcctcaataataagcctgtgtcccttggccaggcattggaagttgtcattcagttacaagagaagcatgtcaaagatgagcagattgaacattggaagaagatagtgaaaactcaggaagaattgaaagaacttcttaataagatggtaaatttgaaagagaaaattaaagaactccatcagcaatacaaagaagcatctgaagtaaagccacccagagatattactgccgagttcttagtgaaaagcaaacacagggatctgaccgccctatgcaaggaatatgatgaattagctgaaacacaaggaaagctagaagaaaaacttcaggagttggaagcgaatcccccaagtgatgtatatctctcatcaagagacagacaaatacttgattggcattttgcaaatcttgaatttgctaatgccacacctctctcaactctctcccttaagcactgggatcaggatgatgactttgagttcactggcagccacctgacagtaaggaatggctactcgtgtgtgcctgtggctttagcagaaggcctagacattaaactgaatacagcagtgcgacaggttcgctacacggcttcaggatgtgaagtgatagctgtgaatacccgctccacgagtcaaacctttatttataaatgcgacgcagttctctgtacccttcccctgggtgtgctgaagcagcagccaccagccgttcagtttgtgccacctctccctgagtggaaaacatctgcagtccaaaggatgggatttggcaaccttaacaaggtggtgttgtgttttgatcgggtgttctgggatccaagtgtcaatttgttcgggcatgttggcagtacgactgccagcaggggtgagctcttcctcttctggaacctctataaagctccaatactgttggcactagtggcaggagaagctgctggtatcatggaaaacataagtgacgatgtgattgttggccgatgcctggccattctcaaagggatttttggtagcagtgcagtacctcagcccaaagaaactgtggtgtctcgttggcgtgctgatccctgggctcggggctcttattcctatgttgctgcaggatcatctggaaatgactatgatttaatggctcagccaatcactcctggcccctcgattccaggtgccccacagccgattccacgactcttctttgcgggagaacatacgatccgtaactacccagccacagtgcatggtgctctgctgagtgggctgcgagaagcgggaagaattgcagaccagtttttgggggccatgtatacgctgcctcgccaggccacaccaggtgttcctgcacagcagtccccaagcatgtgagacagatgcattctaagggaagaggcccatgtgcctgtttctgccatgtaaggaaggctcttctagcaatactagatcccactgagaaaatccaccctggcatctgggctcctgatcagctgatggagctcctgatttgacaaaggagcttgcctcctttgaatgacctagagcacagggaggaacttgtccattagtttggaattgtgttcttcgtaaagactgaggcaagcaagtgctgtgaaataacatcatcttagtcccttggtgtgtggggtttttgttttttttttatattttgagaataaaacttcatataaaattg

SEQ ID NO: 619 - DNA, 3820 bp, Homo sapiens
  source 1..3820: mol_type = genomic DNA
ggcgcgtgcgtacgcgacggcggttggcggcgcgcgggcagcgtgaagcgaggcgaggcaaggcttttcggacccacggagcgacagagcgagcggcccctacggccgtcggcggcccggcggcccgagatgttatctgggaagaaggcggcagccgcggcggcggcggctgcagcggcagcaaccgggacggaggctggccctgggacagcaggcggctccgagaacgggtctgaggtggccgcgcagcccgcgggcctgtcgggcccagccgaggtcgggccgggggcggtgggggagcgcacaccccgcaagaaagagcctccgcgggcctcgccccccgggggcctggcggaaccgccggggtccgcagggcctcaggccggccctactgtcgtgcctgggtctgcgacccccatggaaactggaatagcagagactccggaggggcgtcggaccagccggcgcaagcgggcgaaggtagagtacagagagatggatgaaagcttggccaacctctcagaagatgagtattattcagaagaagagagaaatgccaaagcagagaaggaaaagaagcttcccccaccaccccctcaagccccacctgaggaagaaaatgaaagtgagcctgaagaaccatcggggcaagcaggaggacttcaagacgacagttctggagggtatggagacggccaagcatcaggtgtggagggcgcagctttccagagccgacttcctcatgaccggatgacttctcaagaagcagcctgttttccagatattatcagtggaccacaacagacccagaaggtttttcttttcattagaaaccgcacactgcagttgtggttggataatccaaagattcagctgacatttgaggctactctccaacaattagaagcaccttataacagtgatactgtgcttgtccaccgagttcacagttatttagagcgtcatggtcttatcaacttcggcatctataagaggataaaacccctaccaactaaaaagacaggaaaggtaattattataggctctggggtctcaggcttggcagcagctcgacagttacaaagttttggaatggatgtcacacttttggaagccagggatcgtgtgggtggacgagttgccacatttcgcaaaggaaactatgtagctgatcttggagccatggtggtaacaggtcttggagggaatcctatggctgtggtcagcaaacaagtaaatatggaactggccaagatcaagcaaaaatgcccactttatgaagccaacggacaagctgttcctaaagagaaagatgaaatggtagagcaagagtttaaccggttgctagaagctacatcttaccttagtcatcaactagacttcaatgtcctcaataataagcctgtgtcccttggccaggcattggaagttgtcattcagttacaagagaagcatgtcaaagatgagcagattgaacattggaagaagatagtgaaaactcaggaagaattgaaagaacttcttaataagatggtaaatttgaaagagaaaattaaagaactccatcagcaatacaaagaagcatctgaagtaaagccacccagagatattactgccgagttcttagtgaaaagcaaacacagggatctgaccgccctatgcaaggaatatgatgaattagctgaaacacaaggaaagctagaagaaaaacttcaggagttggaagcgaatcccccaagtcctttgttcttttgcagtgatgtatatctctcatcaagagacagacaaatacttgattggcattttgcaaatcttgaatttgctaatgccacacctctctcaactctctcccttaagcactgggatcaggatgatgactttgagttcactggcagccacctgacagtaaggaatggctactcgtgtgtgcctgtggctttagcagaaggcctagacattaaactgaatacagcagtgcgacaggttcgctacacggcttcaggatgtgaagtgatagctgtgaatacccgctccacgagtcaaacctttatttataaatgcgacgcagttctctgtacccttcccctgggtgtgctgaagcagcagccaccagccgttcagtttgtgccacctctccctgagtggaaaacatctgcagtccaaaggatgggatttggcaaccttaacaaggtggtgttgtgttttgatcgggtgttctgggatccaagtgtcaatttgttcgggcatgttggcagtacgactgccagcaggggtgagctcttcctcttctggaacctctataaagctccaatactgttggcactagtggcaggagaagctgctggtatcatggaaaacataagtgacgatgtgattgttggccgatgcctggccattctcaaagggatttttggtagcagtgcagtacctcagcccaaagaaactgtggtgtctcgttggcgtgctgatccctgggctcggggctcttattcctatgttgctgcaggatcatctggaaatgactatgatttaatggctcagccaatcactcctggcccctcgattccaggtgccccacagattttagtcattccatcttcggaccctttcagataaccaagagcagagttaaaaggatgggcagcatttctgatttctcataatttggttttgtaaatctaggcagtctacattcagaatggaggagtccagagtataagtcaaataacatttttccttattcaggttttctccctaaaaaacaaaaccatttttaattgcacttccattttgtaatggctcataggattgctgtaaggtctcaattactaggggcttccagggcatttctgagaaataaccctgggtccttgtctagacccttatgccagaccccactccaaagagcggtaagaattccttagtgtcatagcccagacctgctgagctgcgaggcttaagtgtccctgatcaccaaatgtcctgtgcttcagggtagcgaggctccctcccagaaggtagttatacatgagggaaggacgctttacaactgggtatctaaactgatgagaacacatgttaagcatcactttaggactgagcctaggtagagttttattgtctcatttctacttgtcaattctgggaaagtgcctactgataagggagactcttcgatagaatgatgaatagtaattgggggggtcagcctttaaaaaggtcaacagcaatttaagtacttagcaatttaagtacaagaataaaggtatatgtgcagcctgccaattttctctttttcccctaaaatagccgattccacgactcttctttgcgggagaacatacgatccgtaactacccagccacagtgcatggtgctctgctgagtgggctgcgagaagcgggaagaattgcagaccagtttttgggggccatgtatacgctgcctcgccaggccacaccaggtgttcctgcacagcagtccccaagcatgtgagacagatgcattctaagggaagaggcccatgtgcctgtttctgccatgtaaggaaggctcttctagcaatactagatcccactgagaaaatccaccctggcatctgggctcctgatcagctgatggagctcctgatttgacaaaggagcttgcctcctttgaatgacctagagcacagggaggaacttgtccattagtttggaattgtgttcttcgtaaagactgaggcaagcaagtgctgtgaaataacatcatcttagtcccttggtgtgtggggtttttgttttttttttatattttgagaataaaacttcatataaaattg

SEQ ID NO: 620 - DNA, 3091 bp, Homo sapiens
  source 1..3091: mol_type = genomic DNA
ggcgcgtgcgtacgcgacggcggttggcggcgcgcgggcagcgtgaagcgaggcgaggcaaggcttttcggacccacggagcgacagagcgagcggcccctacggccgtcggcggcccggcggcccgagatgttatctgggaagaaggcggcagccgcggcggcggcggctgcagcggcagcaaccgggacggaggctggccctgggacagcaggcggctccgagaacgggtctgaggtggccgcgcagcccgcgggcctgtcgggcccagccgaggtcgggccgggggcggtgggggagcgcacaccccgcaagaaagagcctccgcgggcctcgccccccgggggcctggcggaaccgccggggtccgcagggcctcaggccggccctactgtcgtgcctgggtctgcgacccccatggaaactggaatagcagagactccggaggggcgtcggaccagccggcgcaagcgggcgaaggtagagtacagagagatggatgaaagcttggccaacctctcagaagatgagtattattcagaagaagagagaaatgccaaagcagagaaggaaaagaagcttcccccaccaccccctcaagccccacctgaggaagaaaatgaaagtgagcctgaagaaccatcggggcaagcaggaggacttcaagacgacagttctggagggtatggagacggccaagcatcaggtgtggagggcgcagctttccagagccgacttcctcatgaccggatgacttctcaagaagcagcctgttttccagatattatcagtggaccacaacagacccagaaggtttttcttttcattagaaaccgcacactgcagttgtggttggataatccaaagattcagctgacatttgaggctactctccaacaattagaagcaccttataacagtgatactgtgcttgtccaccgagttcacagttatttagagcgtcatggtcttatcaacttcggcatctataagaggataaaacccctaccaactaaaaagacaggaaaggtaattattataggctctggggtctcaggcttggcagcagctcgacagttacaaagttttggaatggatgtcacacttttggaagccagggatcgtgtgggtggacgagttgccacatttcgcaaaggaaactatgtagctgatcttggagccatggtggtaacaggtcttggagggaatcctatggctgtggtcagcaaacaagtaaatatggaactggccaagatcaagcaaaaatgcccactttatgaagccaacggacaagctgttcctaaagagaaagatgaaatggtagagcaagagtttaaccggttgctagaagctacatcttaccttagtcatcaactagacttcaatgtcctcaataataagcctgtgtcccttggccaggcattggaagttgtcattcagttacaagagaagcatgtcaaagatgagcagattgaacattggaagaagatagtgaaaactcaggaagaattgaaagaacttcttaataagatggtaaatttgaaagagaaaattaaagaactccatcagcaatacaaagaagcatctgaagtaaagccacccagagatattactgccgagttcttagtgaaaagcaaacacagggatctgaccgccctatgcaaggaatatgatgaattagctgaaacacaaggaaagctagaagaaaaacttcaggagttggaagcgaatcccccaagtcctttgttcttttgcagtgatgtatatctctcatcaagagacagacaaatacttgattggcattttgcaaatcttgaatttgctaatgccacacctctctcaactctctcccttaagcactgggatcaggatgatgactttgagttcactggcagccacctgacagtaaggaatggctactcgtgtgtgcctgtggctttagcagaaggcctagacattaaactgaatacagcagtgcgacaggttcgctacacggcttcaggatgtgaagtgatagctgtgaatacccgctccacgagtcaaacctttatttataaatgcgacgcagttctctgtacccttcccctgggtgtgctgaagcagcagccaccagccgttcagtttgtgccacctctccctgagtggaaaacatctgcagtccaaaggatgggatttggcaaccttaacaaggtggtgttgtgttttgatcgggtgttctgggatccaagtgtcaatttgttcgggcatgttggcagtacgactgccagcaggggtgagctcttcctcttctggaacctctataaagctccaatactgttggcactagtggcaggagaagctgctggtatcatggaaaacataagtgacgatgtgattgttggccgatgcctggccattctcaaagggatttttggtagcagtgcagtacctcagcccaaagaaactgtggtgtctcgttggcgtgctgatccctgggctcggggctcttattcctatgttgctgcaggatcatctggaaatgactatgatttaatggctcagccaatcactcctggcccctcgattccaggtgccccacagccgattccacgactcttctttgcgggagaacatacgatccgtaactacccagccacagtgcatggtgctctgctgagtgggctgcgagaagcgggaagaattgcagaccagtttttgggggccatgtatacgctgcctcgccaggccacaccaggtgttcctgcacagcagtccccaagcatgtgagacagatgcattctaagggaagaggcccatgtgcctgtttctgccatgtaaggaaggctcttctagcaatactagatcccactgagaaaatccaccctggcatctgggctcctgatcagctgatggagctcctgatttgacaaaggagcttgcctcctttgaatgacctagagcacagggaggaacttgtccattagtttggaattgtgttcttcgtaaagactgaggcaagcaagtgctgtgaaataacatcatcttagtcccttggtgtgtggggtttttgttttttttttatattttgagaataaaacttcatataaaattg

SEQ ID NO: 621 - DNA, 3802 bp, Homo sapiens
  source 1..3802: mol_type = genomic DNA
ggcgcgtgcgtacgcgacggcggttggcggcgcgcgggcagcgtgaagcgaggcgaggcaaggcttttcggacccacggagcgacagagcgagcggcccctacggccgtcggcggcccggcggcccgagatgttatctgggaagaaggcggcagccgcggcggcggcggctgcagcggcagcaaccgggacggaggctggccctgggacagcaggcggctccgagaacgggtctgaggtggccgcgcagcccgcgggcctgtcgggcccagccgaggtcgggccgggggcggtgggggagcgcacaccccgcaagaaagagcctccgcgggcctcgccccccgggggcctggcggaaccgccggggtccgcagggcctcaggccggccctactgtcgtgcctgggtctgcgacccccatggaaactggaatagcagagactccggaggggcgtcggaccagccggcgcaagcgggcgaaggtagagtacagagagatggatgaaagcttggccaacctctcagaagatgagtattattcagaagaagagagaaatgccaaagcagagaaggaaaagaagcttcccccaccaccccctcaagccccacctgaggaagaaaatgaaagtgagcctgaagaaccatcggggcaagcaggaggacttcaagacgacagttctggagggtatggagacggccaagcatcaggtgtggagggcgcagctttccagagccgacttcctcatgaccggatgacttctcaagaagcagcctgttttccagatattatcagtggaccacaacagacccagaaggtttttcttttcattagaaaccgcacactgcagttgtggttggataatccaaagattcagctgacatttgaggctactctccaacaattagaagcaccttataacagtgatactgtgcttgtccaccgagttcacagttatttagagcgtcatggtcttatcaacttcggcatctataagaggataaaacccctaccaactaaaaagacaggaaaggtaattattataggctctggggtctcaggcttggcagcagctcgacagttacaaagttttggaatggatgtcacacttttggaagccagggatcgtgtgggtggacgagttgccacatttcgcaaaggaaactatgtagctgatcttggagccatggtggtaacaggtcttggagggaatcctatggctgtggtcagcaaacaagtaaatatggaactggccaagatcaagcaaaaatgcccactttatgaagccaacggacaagctgttcctaaagagaaagatgaaatggtagagcaagagtttaaccggttgctagaagctacatcttaccttagtcatcaactagacttcaatgtcctcaataataagcctgtgtcccttggccaggcattggaagttgtcattcagttacaagagaagcatgtcaaagatgagcagattgaacattggaagaagatagtgaaaactcaggaagaattgaaagaacttcttaataagatggtaaatttgaaagagaaaattaaagaactccatcagcaatacaaagaagcatctgaagtaaagccacccagagatattactgccgagttcttagtgaaaagcaaacacagggatctgaccgccctatgcaaggaatatgatgaattagctgaaacacaaggaaagctagaagaaaaacttcaggagttggaagcgaatcccccaagtgatgtatatctctcatcaagagacagacaaatacttgattggcattttgcaaatcttgaatttgctaatgccacacctctctcaactctctcccttaagcactgggatcaggatgatgactttgagttcactggcagccacctgacagtaaggaatggctactcgtgtgtgcctgtggctttagcagaaggcctagacattaaactgaatacagcagtgcgacaggttcgctacacggcttcaggatgtgaagtgatagctgtgaatacccgctccacgagtcaaacctttatttataaatgcgacgcagttctctgtacccttcccctgggtgtgctgaagcagcagccaccagccgttcagtttgtgccacctctccctgagtggaaaacatctgcagtccaaaggatgggatttggcaaccttaacaaggtggtgttgtgttttgatcgggtgttctgggatccaagtgtcaatttgttcgggcatgttggcagtacgactgccagcaggggtgagctcttcctcttctggaacctctataaagctccaatactgttggcactagtggcaggagaagctgctggtatcatggaaaacataagtgacgatgtgattgttggccgatgcctggccattctcaaagggatttttggtagcagtgcagtacctcagcccaaagaaactgtggtgtctcgttggcgtgctgatccctgggctcggggctcttattcctatgttgctgcaggatcatctggaaatgactatgatttaatggctcagccaatcactcctggcccctcgattccaggtgccccacagattttagtcattccatcttcggaccctttcagataaccaagagcagagttaaaaggatgggcagcatttctgatttctcataatttggttttgtaaatctaggcagtctacattcagaatggaggagtccagagtataagtcaaataacatttttccttattcaggttttctccctaaaaaacaaaaccatttttaattgcacttccattttgtaatggctcataggattgctgtaaggtctcaattactaggggcttccagggcatttctgagaaataaccctgggtccttgtctagacccttatgccagaccccactccaaagagcggtaagaattccttagtgtcatagcccagacctgctgagctgcgaggcttaagtgtccctgatcaccaaatgtcctgtgcttcagggtagcgaggctccctcccagaaggtagttatacatgagggaaggacgctttacaactgggtatctaaactgatgagaacacatgttaagcatcactttaggactgagcctaggtagagttttattgtctcatttctacttgtcaattctgggaaagtgcctactgataagggagactcttcgatagaatgatgaatagtaattgggggggtcagcctttaaaaaggtcaacagcaatttaagtacttagcaatttaagtacaagaataaaggtatatgtgcagcctgccaattttctctttttcccctaaaatagccgattccacgactcttctttgcgggagaacatacgatccgtaactacccagccacagtgcatggtgctctgctgagtgggctgcgagaagcgggaagaattgcagaccagtttttgggggccatgtatacgctgcctcgccaggccacaccaggtgttcctgcacagcagtccccaagcatgtgagacagatgcattctaagggaagaggcccatgtgcctgtttctgccatgtaaggaaggctcttctagcaatactagatcccactgagaaaatccaccctggcatctgggctcctgatcagctgatggagctcctgatttgacaaaggagcttgcctcctttgaatgacctagagcacagggaggaacttgtccattagtttggaattgtgttcttcgtaaagactgaggcaagcaagtgctgtgaaataacatcatcttagtcccttggtgtgtggggtttttgttttttttttatattttgagaataaaacttcatataaaattg

SEQ ID NO: 622 - DNA, 3073 bp, Homo sapiens
  source 1..3073: mol_type = genomic DNA
ggcgcgtgcgtacgcgacggcggttggcggcgcgcgggcagcgtgaagcgaggcgaggcaaggcttttcggacccacggagcgacagagcgagcggcccctacggccgtcggcggcccggcggcccgagatgttatctgggaagaaggcggcagccgcggcggcggcggctgcagcggcagcaaccgggacggaggctggccctgggacagcaggcggctccgagaacgggtctgaggtggccgcgcagcccgcgggcctgtcgggcccagccgaggtcgggccgggggcggtgggggagcgcacaccccgcaagaaagagcctccgcgggcctcgccccccgggggcctggcggaaccgccggggtccgcagggcctcaggccggccctactgtcgtgcctgggtctgcgacccccatggaaactggaatagcagagactccggaggggcgtcggaccagccggcgcaagcgggcgaaggtagagtacagagagatggatgaaagcttggccaacctctcagaagatgagtattattcagaagaagagagaaatgccaaagcagagaaggaaaagaagcttcccccaccaccccctcaagccccacctgaggaagaaaatgaaagtgagcctgaagaaccatcggggcaagcaggaggacttcaagacgacagttctggagggtatggagacggccaagcatcaggtgtggagggcgcagctttccagagccgacttcctcatgaccggatgacttctcaagaagcagcctgttttccagatattatcagtggaccacaacagacccagaaggtttttcttttcattagaaaccgcacactgcagttgtggttggataatccaaagattcagctgacatttgaggctactctccaacaattagaagcaccttataacagtgatactgtgcttgtccaccgagttcacagttatttagagcgtcatggtcttatcaacttcggcatctataagaggataaaacccctaccaactaaaaagacaggaaaggtaattattataggctctggggtctcaggcttggcagcagctcgacagttacaaagttttggaatggatgtcacacttttggaagccagggatcgtgtgggtggacgagttgccacatttcgcaaaggaaactatgtagctgatcttggagccatggtggtaacaggtcttggagggaatcctatggctgtggtcagcaaacaagtaaatatggaactggccaagatcaagcaaaaatgcccactttatgaagccaacggacaagctgttcctaaagagaaagatgaaatggtagagcaagagtttaaccggttgctagaagctacatcttaccttagtcatcaactagacttcaatgtcctcaataataagcctgtgtcccttggccaggcattggaagttgtcattcagttacaagagaagcatgtcaaagatgagcagattgaacattggaagaagatagtgaaaactcaggaagaattgaaagaacttcttaataagatggtaaatttgaaagagaaaattaaagaactccatcagcaatacaaagaagcatctgaagtaaagccacccagagatattactgccgagttcttagtgaaaagcaaacacagggatctgaccgccctatgcaaggaatatgatgaattagctgaaacacaaggaaagctagaagaaaaacttcaggagttggaagcgaatcccccaagtgatgtatatctctcatcaagagacagacaaatacttgattggcattttgcaaatcttgaatttgctaatgccacacctctctcaactctctcccttaagcactgggatcaggatgatgactttgagttcactggcagccacctgacagtaaggaatggctactcgtgtgtgcctgtggctttagcagaaggcctagacattaaactgaatacagcagtgcgacaggttcgctacacggcttcaggatgtgaagtgatagctgtgaatacccgctccacgagtcaaacctttatttataaatgcgacgcagttctctgtacccttcccctgggtgtgctgaagcagcagccaccagccgttcagtttgtgccacctctccctgagtggaaaacatctgcagtccaaaggatgggatttggcaaccttaacaaggtggtgttgtgttttgatcgggtgttctgggatccaagtgtcaatttgttcgggcatgttggcagtacgactgccagcaggggtgagctcttcctcttctggaacctctataaagctccaatactgttggcactagtggcaggagaagctgctggtatcatggaaaacataagtgacgatgtgattgttggccgatgcctggccattctcaaagggatttttggtagcagtgcagtacctcagcccaaagaaactgtggtgtctcgttggcgtgctgatccctgggctcggggctcttattcctatgttgctgcaggatcatctggaaatgactatgatttaatggctcagccaatcactcctggcccctcgattccaggtgccccacagccgattccacgactcttctttgcgggagaacatacgatccgtaactacccagccacagtgcatggtgctctgctgagtgggctgcgagaagcgggaagaattgcagaccagtttttgggggccatgtatacgctgcctcgccaggccacaccaggtgttcctgcacagcagtccccaagcatgtgagacagatgcattctaagggaagaggcccatgtgcctgtttctgccatgtaaggaaggctcttctagcaatactagatcccactgagaaaatccaccctggcatctgggctcctgatcagctgatggagctcctgatttgacaaaggagcttgcctcctttgaatgacctagagcacagggaggaacttgtccattagtttggaattgtgttcttcgtaaagactgaggcaagcaagtgctgtgaaataacatcatcttagtcccttggtgtgtggggtttttgttttttttttatattttgagaataaaacttcatataaaattg

SEQ ID NO: 623 - DNA, 3760 bp, Homo sapiens
  source 1..3760: mol_type = genomic DNA
ggcgcgtgcgtacgcgacggcggttggcggcgcgcgggcagcgtgaagcgaggcgaggcaaggcttttcggacccacggagcgacagagcgagcggcccctacggccgtcggcggcccggcggcccgagatgttatctgggaagaaggcggcagccgcggcggcggcggctgcagcggcagcaaccgggacggaggctggccctgggacagcaggcggctccgagaacgggtctgaggtggccgcgcagcccgcgggcctgtcgggcccagccgaggtcgggccgggggcggtgggggagcgcacaccccgcaagaaagagcctccgcgggcctcgccccccgggggcctggcggaaccgccggggtccgcagggcctcaggccggccctactgtcgtgcctgggtctgcgacccccatggaaactggaatagcagagactccggaggggcgtcggaccagccggcgcaagcgggcgaaggtagagtacagagagatggatgaaagcttggccaacctctcagaagatgagtattattcagaagaagagagaaatgccaaagcagagaaggaaaagaagcttcccccaccaccccctcaagccccacctgaggaagaaaatgaaagtgagcctgaagaaccatcgggtgtggagggcgcagctttccagagccgacttcctcatgaccggatgacttctcaagaagcagcctgttttccagatattatcagtggaccacaacagacccagaaggtttttcttttcattagaaaccgcacactgcagttgtggttggataatccaaagattcagctgacatttgaggctactctccaacaattagaagcaccttataacagtgatactgtgcttgtccaccgagttcacagttatttagagcgtcatggtcttatcaacttcggcatctataagaggataaaacccctaccaactaaaaagacaggaaaggtaattattataggctctggggtctcaggcttggcagcagctcgacagttacaaagttttggaatggatgtcacacttttggaagccagggatcgtgtgggtggacgagttgccacatttcgcaaaggaaactatgtagctgatcttggagccatggtggtaacaggtcttggagggaatcctatggctgtggtcagcaaacaagtaaatatggaactggccaagatcaagcaaaaatgcccactttatgaagccaacggacaagctgttcctaaagagaaagatgaaatggtagagcaagagtttaaccggttgctagaagctacatcttaccttagtcatcaactagacttcaatgtcctcaataataagcctgtgtcccttggccaggcattggaagttgtcattcagttacaagagaagcatgtcaaagatgagcagattgaacattggaagaagatagtgaaaactcaggaagaattgaaagaacttcttaataagatggtaaatttgaaagagaaaattaaagaactccatcagcaatacaaagaagcatctgaagtaaagccacccagagatattactgccgagttcttagtgaaaagcaaacacagggatctgaccgccctatgcaaggaatatgatgaattagctgaaacacaaggaaagctagaagaaaaacttcaggagttggaagcgaatcccccaagtcctttgttcttttgcagtgatgtatatctctcatcaagagacagacaaatacttgattggcattttgcaaatcttgaatttgctaatgccacacctctctcaactctctcccttaagcactgggatcaggatgatgactttgagttcactggcagccacctgacagtaaggaatggctactcgtgtgtgcctgtggctttagcagaaggcctagacattaaactgaatacagcagtgcgacaggttcgctacacggcttcaggatgtgaagtgatagctgtgaatacccgctccacgagtcaaacctttatttataaatgcgacgcagttctctgtacccttcccctgggtgtgctgaagcagcagccaccagccgttcagtttgtgccacctctccctgagtggaaaacatctgcagtccaaaggatgggatttggcaaccttaacaaggtggtgttgtgttttgatcgggtgttctgggatccaagtgtcaatttgttcgggcatgttggcagtacgactgccagcaggggtgagctcttcctcttctggaacctctataaagctccaatactgttggcactagtggcaggagaagctgctggtatcatggaaaacataagtgacgatgtgattgttggccgatgcctggccattctcaaagggatttttggtagcagtgcagtacctcagcccaaagaaactgtggtgtctcgttggcgtgctgatccctgggctcggggctcttattcctatgttgctgcaggatcatctggaaatgactatgatttaatggctcagccaatcactcctggcccctcgattccaggtgccccacagattttagtcattccatcttcggaccctttcagataaccaagagcagagttaaaaggatgggcagcatttctgatttctcataatttggttttgtaaatctaggcagtctacattcagaatggaggagtccagagtataagtcaaataacatttttccttattcaggttttctccctaaaaaacaaaaccatttttaattgcacttccattttgtaatggctcataggattgctgtaaggtctcaattactaggggcttccagggcatttctgagaaataaccctgggtccttgtctagacccttatgccagaccccactccaaagagcggtaagaattccttagtgtcatagcccagacctgctgagctgcgaggcttaagtgtccctgatcaccaaatgtcctgtgcttcagggtagcgaggctccctcccagaaggtagttatacatgagggaaggacgctttacaactgggtatctaaactgatgagaacacatgttaagcatcactttaggactgagcctaggtagagttttattgtctcatttctacttgtcaattctgggaaagtgcctactgataagggagactcttcgatagaatgatgaatagtaattgggggggtcagcctttaaaaaggtcaacagcaatttaagtacttagcaatttaagtacaagaataaaggtatatgtgcagcctgccaattttctctttttcccctaaaatagccgattccacgactcttctttgcgggagaacatacgatccgtaactacccagccacagtgcatggtgctctgctgagtgggctgcgagaagcgggaagaattgcagaccagtttttgggggccatgtatacgctgcctcgccaggccacaccaggtgttcctgcacagcagtccccaagcatgtgagacagatgcattctaagggaagaggcccatgtgcctgtttctgccatgtaaggaaggctcttctagcaatactagatcccactgagaaaatccaccctggcatctgggctcctgatcagctgatggagctcctgatttgacaaaggagcttgcctcctttgaatgacctagagcacagggaggaacttgtccattagtttggaattgtgttcttcgtaaagactgaggcaagcaagtgctgtgaaataacatcatcttagtcccttggtgtgtggggtttttgttttttttttatattttgagaataaaacttcatataaaattg

SEQ ID NO: 624 - DNA, 3031 bp, Homo sapiens
  source 1..3031: mol_type = genomic DNA
ggcgcgtgcgtacgcgacggcggttggcggcgcgcgggcagcgtgaagcgaggcgaggcaaggcttttcggacccacggagcgacagagcgagcggcccctacggccgtcggcggcccggcggcccgagatgttatctgggaagaaggcggcagccgcggcggcggcggctgcagcggcagcaaccgggacggaggctggccctgggacagcaggcggctccgagaacgggtctgaggtggccgcgcagcccgcgggcctgtcgggcccagccgaggtcgggccgggggcggtgggggagcgcacaccccgcaagaaagagcctccgcgggcctcgccccccgggggcctggcggaaccgccggggtccgcagggcctcaggccggccctactgtcgtgcctgggtctgcgacccccatggaaactggaatagcagagactccggaggggcgtcggaccagccggcgcaagcgggcgaaggtagagtacagagagatggatgaaagcttggccaacctctcagaagatgagtattattcagaagaagagagaaatgccaaagcagagaaggaaaagaagcttcccccaccaccccctcaagccccacctgaggaagaaaatgaaagtgagcctgaagaaccatcgggtgtggagggcgcagctttccagagccgacttcctcatgaccggatgacttctcaagaagcagcctgttttccagatattatcagtggaccacaacagacccagaaggtttttcttttcattagaaaccgcacactgcagttgtggttggataatccaaagattcagctgacatttgaggctactctccaacaattagaagcaccttataacagtgatactgtgcttgtccaccgagttcacagttatttagagcgtcatggtcttatcaacttcggcatctataagaggataaaacccctaccaactaaaaagacaggaaaggtaattattataggctctggggtctcaggcttggcagcagctcgacagttacaaagttttggaatggatgtcacacttttggaagccagggatcgtgtgggtggacgagttgccacatttcgcaaaggaaactatgtagctgatcttggagccatggtggtaacaggtcttggagggaatcctatggctgtggtcagcaaacaagtaaatatggaactggccaagatcaagcaaaaatgcccactttatgaagccaacggacaagctgttcctaaagagaaagatgaaatggtagagcaagagtttaaccggttgctagaagctacatcttaccttagtcatcaactagacttcaatgtcctcaataataagcctgtgtcccttggccaggcattggaagttgtcattcagttacaagagaagcatgtcaaagatgagcagattgaacattggaagaagatagtgaaaactcaggaagaattgaaagaacttcttaataagatggtaaatttgaaagagaaaattaaagaactccatcagcaatacaaagaagcatctgaagtaaagccacccagagatattactgccgagttcttagtgaaaagcaaacacagggatctgaccgccctatgcaaggaatatgatgaattagctgaaacacaaggaaagctagaagaaaaacttcaggagttggaagcgaatcccccaagtcctttgttcttttgcagtgatgtatatctctcatcaagagacagacaaatacttgattggcattttgcaaatcttgaatttgctaatgccacacctctctcaactctctcccttaagcactgggatcaggatgatgactttgagttcactggcagccacctgacagtaaggaatggctactcgtgtgtgcctgtggctttagcagaaggcctagacattaaactgaatacagcagtgcgacaggttcgctacacggcttcaggatgtgaagtgatagctgtgaatacccgctccacgagtcaaacctttatttataaatgcgacgcagttctctgtacccttcccctgggtgtgctgaagcagcagccaccagccgttcagtttgtgccacctctccctgagtggaaaacatctgcagtccaaaggatgggatttggcaaccttaacaaggtggtgttgtgttttgatcgggtgttctgggatccaagtgtcaatttgttcgggcatgttggcagtacgactgccagcaggggtgagctcttcctcttctggaacctctataaagctccaatactgttggcactagtggcaggagaagctgctggtatcatggaaaacataagtgacgatgtgattgttggccgatgcctggccattctcaaagggatttttggtagcagtgcagtacctcagcccaaagaaactgtggtgtctcgttggcgtgctgatccctgggctcggggctcttattcctatgttgctgcaggatcatctggaaatgactatgatttaatggctcagccaatcactcctggcccctcgattccaggtgccccacagccgattccacgactcttctttgcgggagaacatacgatccgtaactacccagccacagtgcatggtgctctgctgagtgggctgcgagaagcgggaagaattgcagaccagtttttgggggccatgtatacgctgcctcgccaggccacaccaggtgttcctgcacagcagtccccaagcatgtgagacagatgcattctaagggaagaggcccatgtgcctgtttctgccatgtaaggaaggctcttctagcaatactagatcccactgagaaaatccaccctggcatctgggctcctgatcagctgatggagctcctgatttgacaaaggagcttgcctcctttgaatgacctagagcacagggaggaacttgtccattagtttggaattgtgttcttcgtaaagactgaggcaagcaagtgctgtgaaataacatcatcttagtcccttggtgtgtggggtttttgttttttttttatattttgagaataaaacttcatataaaattg

SEQ ID NO: 625 - DNA, 3742 bp, Homo sapiens
  source 1..3742: mol_type = genomic DNA
ggcgcgtgcgtacgcgacggcggttggcggcgcgcgggcagcgtgaagcgaggcgaggcaaggcttttcggacccacggagcgacagagcgagcggcccctacggccgtcggcggcccggcggcccgagatgttatctgggaagaaggcggcagccgcggcggcggcggctgcagcggcagcaaccgggacggaggctggccctgggacagcaggcggctccgagaacgggtctgaggtggccgcgcagcccgcgggcctgtcgggcccagccgaggtcgggccgggggcggtgggggagcgcacaccccgcaagaaagagcctccgcgggcctcgccccccgggggcctggcggaaccgccggggtccgcagggcctcaggccggccctactgtcgtgcctgggtctgcgacccccatggaaactggaatagcagagactccggaggggcgtcggaccagccggcgcaagcgggcgaaggtagagtacagagagatggatgaaagcttggccaacctctcagaagatgagtattattcagaagaagagagaaatgccaaagcagagaaggaaaagaagcttcccccaccaccccctcaagccccacctgaggaagaaaatgaaagtgagcctgaagaaccatcgggtgtggagggcgcagctttccagagccgacttcctcatgaccggatgacttctcaagaagcagcctgttttccagatattatcagtggaccacaacagacccagaaggtttttcttttcattagaaaccgcacactgcagttgtggttggataatccaaagattcagctgacatttgaggctactctccaacaattagaagcaccttataacagtgatactgtgcttgtccaccgagttcacagttatttagagcgtcatggtcttatcaacttcggcatctataagaggataaaacccctaccaactaaaaagacaggaaaggtaattattataggctctggggtctcaggcttggcagcagctcgacagttacaaagttttggaatggatgtcacacttttggaagccagggatcgtgtgggtggacgagttgccacatttcgcaaaggaaactatgtagctgatcttggagccatggtggtaacaggtcttggagggaatcctatggctgtggtcagcaaacaagtaaatatggaactggccaagatcaagcaaaaatgcccactttatgaagccaacggacaagctgttcctaaagagaaagatgaaatggtagagcaagagtttaaccggttgctagaagctacatcttaccttagtcatcaactagacttcaatgtcctcaataataagcctgtgtcccttggccaggcattggaagttgtcattcagttacaagagaagcatgtcaaagatgagcagattgaacattggaagaagatagtgaaaactcaggaagaattgaaagaacttcttaataagatggtaaatttgaaagagaaaattaaagaactccatcagcaatacaaagaagcatctgaagtaaagccacccagagatattactgccgagttcttagtgaaaagcaaacacagggatctgaccgccctatgcaaggaatatgatgaattagctgaaacacaaggaaagctagaagaaaaacttcaggagttggaagcgaatcccccaagtgatgtatatctctcatcaagagacagacaaatacttgattggcattttgcaaatcttgaatttgctaatgccacacctctctcaactctctcccttaagcactgggatcaggatgatgactttgagttcactggcagccacctgacagtaaggaatggctactcgtgtgtgcctgtggctttagcagaaggcctagacattaaactgaatacagcagtgcgacaggttcgctacacggcttcaggatgtgaagtgatagctgtgaatacccgctccacgagtcaaacctttatttataaatgcgacgcagttctctgtacccttcccctgggtgtgctgaagcagcagccaccagccgttcagtttgtgccacctctccctgagtggaaaacatctgcagtccaaaggatgggatttggcaaccttaacaaggtggtgttgtgttttgatcgggtgttctgggatccaagtgtcaatttgttcgggcatgttggcagtacgactgccagcaggggtgagctcttcctcttctggaacctctataaagctccaatactgttggcactagtggcaggagaagctgctggtatcatggaaaacataagtgacgatgtgattgttggccgatgcctggccattctcaaagggatttttggtagcagtgcagtacctcagcccaaagaaactgtggtgtctcgttggcgtgctgatccctgggctcggggctcttattcctatgttgctgcaggatcatctggaaatgactatgatttaatggctcagccaatcactcctggcccctcgattccaggtgccccacagattttagtcattccatcttcggaccctttcagataaccaagagcagagttaaaaggatgggcagcatttctgatttctcataatttggttttgtaaatctaggcagtctacattcagaatggaggagtccagagtataagtcaaataacatttttccttattcaggttttctccctaaaaaacaaaaccatttttaattgcacttccattttgtaatggctcataggattgctgtaaggtctcaattactaggggcttccagggcatttctgagaaataaccctgggtccttgtctagacccttatgccagaccccactccaaagagcggtaagaattccttagtgtcatagcccagacctgctgagctgcgaggcttaagtgtccctgatcaccaaatgtcctgtgcttcagggtagcgaggctccctcccagaaggtagttatacatgagggaaggacgctttacaactgggtatctaaactgatgagaacacatgttaagcatcactttaggactgagcctaggtagagttttattgtctcatttctacttgtcaattctgggaaagtgcctactgataagggagactcttcgatagaatgatgaatagtaattgggggggtcagcctttaaaaaggtcaacagcaatttaagtacttagcaatttaagtacaagaataaaggtatatgtgcagcctgccaattttctctttttcccctaaaatagccgattccacgactcttctttgcgggagaacatacgatccgtaactacccagccacagtgcatggtgctctgctgagtgggctgcgagaagcgggaagaattgcagaccagtttttgggggccatgtatacgctgcctcgccaggccacaccaggtgttcctgcacagcagtccccaagcatgtgagacagatgcattctaagggaagaggcccatgtgcctgtttctgccatgtaaggaaggctcttctagcaatactagatcccactgagaaaatccaccctggcatctgggctcctgatcagctgatggagctcctgatttgacaaaggagcttgcctcctttgaatgacctagagcacagggaggaacttgtccattagtttggaattgtgttcttcgtaaagactgaggcaagcaagtgctgtgaaataacatcatcttagtcccttggtgtgtggggtttttgttttttttttatattttgagaataaaacttcatataaaattg

SEQ ID NO: 626 - DNA, 3013 bp, Homo sapiens
  source 1..3013: mol_type = genomic DNA
ggcgcgtgcgtacgcgacggcggttggcggcgcgcgggcagcgtgaagcgaggcgaggcaaggcttttcggacccacggagcgacagagcgagcggcccctacggccgtcggcggcccggcggcccgagatgttatctgggaagaaggcggcagccgcggcggcggcggctgcagcggcagcaaccgggacggaggctggccctgggacagcaggcggctccgagaacgggtctgaggtggccgcgcagcccgcgggcctgtcgggcccagccgaggtcgggccgggggcggtgggggagcgcacaccccgcaagaaagagcctccgcgggcctcgccccccgggggcctggcggaaccgccggggtccgcagggcctcaggccggccctactgtcgtgcctgggtctgcgacccccatggaaactggaatagcagagactccggaggggcgtcggaccagccggcgcaagcgggcgaaggtagagtacagagagatggatgaaagcttggccaacctctcagaagatgagtattattcagaagaagagagaaatgccaaagcagagaaggaaaagaagcttcccccaccaccccctcaagccccacctgaggaagaaaatgaaagtgagcctgaagaaccatcgggtgtggagggcgcagctttccagagccgacttcctcatgaccggatgacttctcaagaagcagcctgttttccagatattatcagtggaccacaacagacccagaaggtttttcttttcattagaaaccgcacactgcagttgtggttggataatccaaagattcagctgacatttgaggctactctccaacaattagaagcaccttataacagtgatactgtgcttgtccaccgagttcacagttatttagagcgtcatggtcttatcaacttcggcatctataagaggataaaacccctaccaactaaaaagacaggaaaggtaattattataggctctggggtctcaggcttggcagcagctcgacagttacaaagttttggaatggatgtcacacttttggaagccagggatcgtgtgggtggacgagttgccacatttcgcaaaggaaactatgtagctgatcttggagccatggtggtaacaggtcttggagggaatcctatggctgtggtcagcaaacaagtaaatatggaactggccaagatcaagcaaaaatgcccactttatgaagccaacggacaagctgttcctaaagagaaagatgaaatggtagagcaagagtttaaccggttgctagaagctacatcttaccttagtcatcaactagacttcaatgtcctcaataataagcctgtgtcccttggccaggcattggaagttgtcattcagttacaagagaagcatgtcaaagatgagcagattgaacattggaagaagatagtgaaaactcaggaagaattgaaagaacttcttaataagatggtaaatttgaaagagaaaattaaagaactccatcagcaatacaaagaagcatctgaagtaaagccacccagagatattactgccgagttcttagtgaaaagcaaacacagggatctgaccgccctatgcaaggaatatgatgaattagctgaaacacaaggaaagctagaagaaaaacttcaggagttggaagcgaatcccccaagtgatgtatatctctcatcaagagacagacaaatacttgattggcattttgcaaatcttgaatttgctaatgccacacctctctcaactctctcccttaagcactgggatcaggatgatgactttgagttcactggcagccacctgacagtaaggaatggctactcgtgtgtgcctgtggctttagcagaaggcctagacattaaactgaatacagcagtgcgacaggttcgctacacggcttcaggatgtgaagtgatagctgtgaatacccgctccacgagtcaaacctttatttataaatgcgacgcagttctctgtacccttcccctgggtgtgctgaagcagcagccaccagccgttcagtttgtgccacctctccctgagtggaaaacatctgcagtccaaaggatgggatttggcaaccttaacaaggtggtgttgtgttttgatcgggtgttctgggatccaagtgtcaatttgttcgggcatgttggcagtacgactgccagcaggggtgagctcttcctcttctggaacctctataaagctccaatactgttggcactagtggcaggagaagctgctggtatcatggaaaacataagtgacgatgtgattgttggccgatgcctggccattctcaaagggatttttggtagcagtgcagtacctcagcccaaagaaactgtggtgtctcgttggcgtgctgatccctgggctcggggctcttattcctatgttgctgcaggatcatctggaaatgactatgatttaatggctcagccaatcactcctggcccctcgattccaggtgccccacagccgattccacgactcttctttgcgggagaacatacgatccgtaactacccagccacagtgcatggtgctctgctgagtgggctgcgagaagcgggaagaattgcagaccagtttttgggggccatgtatacgctgcctcgccaggccacaccaggtgttcctgcacagcagtccccaagcatgtgagacagatgcattctaagggaagaggcccatgtgcctgtttctgccatgtaaggaaggctcttctagcaatactagatcccactgagaaaatccaccctggcatctgggctcctgatcagctgatggagctcctgatttgacaaaggagcttgcctcctttgaatgacctagagcacagggaggaacttgtccattagtttggaattgtgttcttcgtaaagactgaggcaagcaagtgctgtgaaataacatcatcttagtcccttggtgtgtggggtttttgttttttttttatattttgagaataaaacttcatataaaattg

SEQ ID NO: 627 - DNA, 8540 bp, Homo sapiens
  source 1..8540: mol_type = genomic DNA
agtcctcccgtcttgcgccgcggccgcgagatccgtgtgtctcccaagatggtggcgctgggctcggggtgactacaggagacgacggggccttttcccttcgccaggacccgacacaccaggcttcgctcgctcgcgcacccctccgccgcgtagccatccgccagcgcgggcgcccgccatccgccgcctacttacgcttcacctctgccgacccggcgcgctcggctgcgggcggcggcgcctccttcggctcctcctcggaatagctcgcggcctgtagcccctggcaggagggcccctcagccccccggtgtggacaggcagcggcggctggcgacgaacgccgggatttcggcggccccggcgctccctttcccggcctcgttttccggataaggaagcgcgggtcccgcatgagccccggcggtggcggcagcgaaagagaacgaggcggtggcgggcggaggcggcgggcgagggcgactacgaccagtgaggcggccgccgcagcccaggcgcgggggcgacgacagatcaggagaacctcagtctgacgacattgaagctagccgaatgaagcgagcagctgcaaagcatctaatagaacgctactaccaccagttaactgagggctgtggaaatgaagcctgcacgaatgagttttgtgcttcctgtccaacttttcttcgtatggataataatgcagcagctattaaagccctcgagctttataagattaatgcaaaactctgtgatcctcatccctccaagaaaggagcaagctcagcttaccttgagaactcgaaaggtgcccccaacaactcctgctctgagataaaaatgaacaagaaaggcgctagaattgattttaaagatgtgacttacttaacagaagagaaggtatatgaaattcttgaattatgtagagaaagagaggattattcccctttaatccgtgttattggaagagttttttctagtgctgaggcattggtacagagcttccggaaagttaaacaacacaccaaggaagaactgaaatctcttcaagcaaaagatgaagacaaagatgaagatgaaaaggaaaaagctgcatgttctgctgctgctatggaagaagactcagaagcatcttcctcaaggataggtgatagctcacagggagacaacaatttgcaaaaattaggccctgatgatgtgtctgtggatattgatgccattagaagggtctacaccagattgctctctaatgaaaaaattgaaactgcctttctcaatgcacttgtatatttgtcacctaacgtggaatgtgacttgacgtatcacaatgtatactctcgagatcctaattatctgaatttgttcattatcgtaatggagaatagaaatctccacagtcctgaatatctggaaatggctttgccattattttgcaaagcgatgagcaagctaccccttgcagcccaaggaaaactgatcagactgtggtctaaatacaatgcagaccagattcggagaatgatggagacatttcagcaacttattacttataaagtcataagcaatgaatttaacagtcgaaatctagtgaatgatgatgatgccattgttgctgcttcgaagtgcttgaaaatggtttactatgcaaatgtagtgggaggggaagtggacacaaatcacaatgaagaagatgatgaagagcccatccctgagtccagcgagctgacacttcaggaacttttgggagaagaaagaagaaacaagaaaggtcctcgagtggaccccctggaaactgaacttggtgttaaaaccctggattgtcgaaaaccacttatcccttttgaagagtttattaatgaaccactgaatgaggttctagaaatggataaagattatacttttttcaaagtagaaacagagaacaaattctcttttatgacatgtccctttatattgaatgctgtcacaaagaatttgggattatattatgacaatagaattcgcatgtacagtgaacgaagaatcactgttctctacagcttagttcaaggacagcagttgaatccatatttgagactcaaagttagacgtgaccatatcatagatgatgcacttgtccggagatgatcgctatggaaaatcctgcagacttgaagaagcagttgtatgtggaatttgaaggagaacaaggagttgatgagggaggtgtttccaaagaattttttcagctggttgtggaggaaatcttcaatccagatattggtatgttcacatacgatgaatctacaaaattgttttggtttaatccatcttcttttgaaactgagggtcagtttactctgattggcatagtactgggtctggctatttacaataactgtatactggatgtacattttcccatggttgtctacaggaagctaatggggaaaaaaggaacttttcgtgacttgggagactctcacccagttctatatcagagtttaaaagatttattggagtatgaagggaatgtggaagatgacatgatgatcactttccagatatcacagacagatctttttggtaacccaatgatgtatgatctaaaggaaaatggtgataaaattccaattacaaatgaaaacaggaaggaatttgtcaatctttattctgactacattctcaataaatcagtagaaaaacagttcaaggcttttcggagaggttttcatatggtgaccaatgaatctcccttaaagtacttattcagaccagaagaaattgaattgcttatatgtggaagccggaatctagatttccaagcactagaagaaactacagaatatgacggtggctataccagggactctgttctgattagggagttctgggaaatcgttcattcatttacagatgaacagaaaagactcttcttgcagtttacaacgggcacagacagagcacctgtgggaggactaggaaaattaaagatgattatagccaaaaatggcccagacacagaaaggttacctacatctcatacttgctttaatgtgcttttacttccggaatactcaagcaaagaaaaacttaaagagagattgttgaaggccatcacgtatgccaaaggatttggcatgctgtaaaacaaaacaaaacaaaataaaacaaaaaaaaggaaggaaaaaaaaagaaaaaatttaaaaaattttaaaaatataacgagggataaatttttggtggtgatagtgtcccagtacaaaaaggctgtaagatagtcaaccacagtagtcacctatgtctgtgcctcccttctttattggggacatgtgggctggaacagcagatttcagctacatatatgaacaaatcctttattattattataattatttttttgcgtgaaagtgttacatattctttcacttgtatgtacagagaggtttttctgaatatttattttaagggttaaatcacttttgcttgtgtttattactgcttgaggttgagccttttgagtatttaaaaaatatataccaacagaactactctcccaaggaaaatattgccaccatttgtagaccacgtaaccttcaagtatgtgctacttttttgtccctgtatctaactcaaatcaggaactgtattttttttaatgatttgcttttgaaacttgaagtcttgaaaacagtgtgatgcaattactgctgttctagcccccaaagagttttctgtgcaaaatcttgagaatcaatcaataaagaaagatggaaggaagggagaaattggaatgttttaactgcagccctcagaactttagtaacagcacaacaaattaaaaacaaaaacaactcatgccacagtatgtcgtcttcatgtgtcttgcaatgaactgtttcagtagccaatcctctttcttagtatatgaaaggacagggatttttgttcttgttgttctcgttgttgttttaagtttactggggaaagtgcatttggccaaatgaaatggtagtcaagcctattgcaacaaagttaggaagtttgttgtttgtttattataaacaaaaagcatgtgaaagtgcacttaagatagagtttttattaattacttacttattacctagattttaaatagacaatccaaagtctccccttcgtgttgccatcatcttgttgaatcagccattttatcgaggcacgtgatcagtgttgcaacataatgaaaaagatggctactgtgccttgtgttacttaatcatacagtaagctgacctggaaatgaatgaaactattactcctaagaattacattgtatagccccacagattaaatttaattaattaattcaaaacatgttaaacgttactttcatgtactatggaaaagtacaagtaggtttacattactgatttccagaagtaagtagtttcccctttcctagtcttctgtgtatgtgatgttgttaatttcttttattgcattataaaataaaaggattatgtatttttaactaaggtgagacattgatatatccttttgctacaagctatagctaatgtgctgagcttgtgccttggtgattgattgattgattgactgattgttttaactgattactgtagatcaacctgatgatttgtttgtttgaaattggcaggaaaaatgcagctttcaaatcattggggggagaaaaaggatgtctttcaggattattttaattaatttttttcataattgagacagaactgtttgttatgtaccataatgctaaataaaactgtggcacttttcaccataatttaatttagtggaaaaagaagacaatgctttccatattgtgataaggtaacatggggtttttctgggccagcctttagaacactgttagggtacatacgctaccttgatgaaagggaccttcgtgcaactgtagtcatcttaaaggcttctcatccactgtgcttcttaatgtgtaattaaagtgaggagaaattaaatactctgagggcgttttatataataaattcgtgaagaaatgtgtgctcttcagttctcaagttttattattatggtatttattaaagttctacaattgtaataacgtatccatatgacaagttttaaagtggtaattgaaataggttatcagatatagagttgttcacatcaagtagacttttaacagagtcagaatgaacctacccttaaaattttagagaaaaaaaatcgtcggttgcacagaatagctgctctagcttgcttaattatgccgggcatgttgtcactcctcttacttttgctgccttttcattactatttaatggaatgtccctgaacaataaggaagagcaaaacatagacattttgactacagtggatacttcctctaccccaaatgttatgttataaaagtactttttttgcccaggtactctattatatattttggttttctttgaattagacctcaatctccaggaagctctggagggaaaaaaaggaaccataaactaaagtaactggttttccaaataaatgtaaacttttttaaccttttattattatagaacatttcaaacatacataaaacatgaaaacagcctgcagccaaacttttctggaccttggcagctccagcaaatgagctggtcatcctaaccctggtttcctgagacaactacttttggggatgcttgcttgtatagggagatgatagatagatagatacatatcaaaaagaaacttgaaaaaggcttcgaacagaacttgccgatgttactcatccctcctcggtacagacattctgttagaacagatggttgtaatggggcagcatcactccctattcccattaaaaacatgaccattctgagatttcaggccccttcgaggaatttttctcaagaattccatacaaactgtcagaggaagaaatgtcgtcccaagactagtccctgtgtagtcttgatccctttacctgcttactgtaattttttttctctgactttccgccagtgtctaagggccatctgtacccctcccacccttccatgagccactgtataatccaaaaacacaccttccatttgctccctcacttgtctccttttacctcaacagtgttagtgtgtaaagaattgcctggggagggtagagggttttacaagtacagagtcccaagtcttttctcccctccccgttagtgggttggcatttattaataggcactgcaagattttgatgcaggtgtggggtagatatcactgtgaaaggctactaatgcatggtagtttcaccgaaagtacagtcttcaaggatccttataatctcctcattgccaaaatcagtaacatctataaccttgacaacaccctagcttgggctgttgcttctctggctacttgtttttccatcccagtttacccagattttagatggatactcctccaattctgcttaaagtccttacctgttcttgcccagttccctctagtcaacctcagtcactcccaaagattcttccccaatcccatatcttttgctcagacctctgtctctgggatttctttgttacctcatagtcagtagtcctaaaaacaaaattcttcatcttgcatctctatcgaccgaccattctttgtttctttttaagaaatgtaaccttcaccccaatcatcaaaatctctcattcctcaattgtcacaggttgtcacttctttccccctaaacctctcccatcattccttccttctttatactgcccttacaggtcctgatcctctgactcacccggacattcttagcagctgcctaatttcactccctgactctcatctccctcttccaatccttttcattgtgctagaacactatcttgctaattttaatatcctctgcattcagtgcctccacagattgccccctcactgacctttccaatttggccttgtgttacacactttcctcgctgcattcctacccagcatcttcacttgtcatatttctcaaatactcttcatgaccagatatttaaagtacctcatccatgaagacttcatcaacccccaaagtgcctccaatgcttccgtggtagcacagcataatggggtacatttcttagttgaacagtgaggagtcactgggattcttacagagtgtcttagggtctcctcttgatactctttccacatttcagttaaggaattttcttacatctttttttcttctaataacctttgcctggagtgtaagtaaattcatgatagagactgtcatttttaaaaaaaaaaacaaaccattttgcctttcacatgttattacctccatctttctgttatcttgtcagtgttgccacctaaatgattgaaaatgaccgagcatgcagtagaatgtagtgaagtttcctatttcatccattttttgcataagtgcattggtatctgtatatccatctgcccaagcaccagttgttgaaaagactattatttccccatgaatggtcctggtacccttgtcaaagaacagttgaccataaatataagactttctggattctcagtcttactccattgccctatatgtctgtcgttataccagcaccgcactgtcttgatggctgtagcttggtagtaagtttagatttgggatgtgcaagtcctccattttttttttttttttccccaaaatcattttgtctgttttgggtcccttgcattgcatatgaatttttatatgatcattgtgtcaattcctgcaaaacagctgggatcttgatagggatttagttgaattggtagataaatttgagaaataactgctattttaatggtgttaggttttctgttccatgactgtgggatgtctttgcatttgcttaggtctttatttcagtgatgttttagagatttcagtgtgcaagtcttgacgtctttaatttttttctaagtattttactgatgccactttaattatatgattattttctaatttttatttttgtattcatcactggtgttagaaataaaattaatttttgtatattgattttgtatattgtagcttttctaaaattctttttttgtcacttagtattttttgcatatgagatcatgcatctgtgaacagaaatacttttacttcttcctttccagtctagattcctattatttcattttcttgccttagtgtgctggctagcacctccagtacaatattggatagaagtgacaagagcagacatctttttcttgttcctgattttaaggggaaagcattcagtctttcaccattgagtatgatgttagctagctgtgggtttgcttcaagttgaggaaattcttttattaaacctagtttactgagtgttttttaatcaaaaaaaaaaaaaggaggggctgtgggttttgttaaatgcttcttctgtatcaagattttcatgttgttttgtcctttattaatatgttgtattaatggacttttgtatattgaattaactttgcattcctgggataatctcagttgtccatgctacataaaccttgttctatgctgctgga

SEQ ID NO: 628 - DNA, 8888 bp, Homo sapiens
  source 1..8888: mol_type = genomic DNA
gctgcctgccgggatactcggcccgcccagccagtcctcccgtcttgcgccgcggccgcgagatccgtgtgtctcccaagatggtggcgctgggctcggggtgactacaggagacgacggggccttttcccttcgccaggacccgacacaccaggcttcgctcgctcgcgcacccctccgccgcgtagccatccgccagcgcgggcgcccgccatccgccgcctacttacgcttcacctctgccgacccggcgcgctcggctgcgggcggcggcgcctccttcggctcctcctcggaatagctcgcggcctgtagcccctggcaggagggcccctcagccccccggtgtggacaggcagcggcggctggcgacgaacgccgggatttcggcggccccggcgctccctttcccggcctcgttttccggataaggaagcgcgggtcccgcatgagccccggcggtggcggcagcgaaagagaacgaggcggtggcgggcggaggcggcgggcgagggcgactacgaccagtgaggcggccgccgcagcccaggcgcgggggcgacgacagaggggaggtatggtgtcaagaaaacatagtcaccattattacgaaaagtaaaatatggaagagatgatccctaccatcaatcagcttacaactagaggcactgacaaatgtatacagatagctgtaatgttaaaaatctgtaagagcctgattttagaattcaccagctcctcagaagtttggcgaaatatgagttattaagcctacgctcagatcaaggtagcagctagactggtgtgacaacctgtttttaatcagtgactcaaagctgtgatcaccctgatgtcaccgaatggccacagcttgtaaaagatcaggagaacctcagtctgacgacattgaagctagccgaatgaagcgagcagctgcaaagcatctaatagaacgctactaccaccagttaactgagggctgtggaaatgaagcctgcacgaatgagttttgtgcttcctgtccaacttttcttcgtatggataataatgcagcagctattaaagccctcgagctttataagattaatgcaaaactctgtgatcctcatccctccaagaaaggagcaagctcagcttaccttgagaactcgaaaggtgcccccaacaactcctgctctgagataaaaatgaacaagaaaggcgctagaattgattttaaagatgtgacttacttaacagaagagaaggtatatgaaattcttgaattatgtagagaaagagaggattattcccctttaatccgtgttattggaagagttttttctagtgctgaggcattggtacagagcttccggaaagttaaacaacacaccaaggaagaactgaaatctcttcaagcaaaagatgaagacaaagatgaagatgaaaaggaaaaagctgcatgttctgctgctgctatggaagaagactcagaagcatcttcctcaaggataggtgatagctcacagggagacaacaatttgcaaaaattaggccctgatgatgtgtctgtggatattgatgccattagaagggtctacaccagattgctctctaatgaaaaaattgaaactgcctttctcaatgcacttgtatatttgtcacctaacgtggaatgtgacttgacgtatcacaatgtatactctcgagatcctaattatctgaatttgttcattatcgtaatggagaatagaaatctccacagtcctgaatatctggaaatggctttgccattattttgcaaagcgatgagcaagctaccccttgcagcccaaggaaaactgatcagactgtggtctaaatacaatgcagaccagattcggagaatgatggagacatttcagcaacttattacttataaagtcataagcaatgaatttaacagtcgaaatctagtgaatgatgatgatgccattgttgctgcttcgaagtgcttgaaaatggtttactatgcaaatgtagtgggaggggaagtggacacaaatcacaatgaagaagatgatgaagagcccatccctgagtccagcgagctgacacttcaggaacttttgggagaagaaagaagaaacaagaaaggtcctcgagtggaccccctggaaactgaacttggtgttaaaaccctggattgtcgaaaaccacttatcccttttgaagagtttattaatgaaccactgaatgaggttctagaaatggataaagattatacttttttcaaagtagaaacagagaacaaattctcttttatgacatgtccctttatattgaatgctgtcacaaagaatttgggattatattatgacaatagaattcgcatgtacagtgaacgaagaatcactgttctctacagcttagttcaaggacagcagttgaatccatatttgagactcaaagttagacgtgaccatatcatagatgatgcacttgtccggctagagatgatcgctatggaaaatcctgcagacttgaagaagcagttgtatgtggaatttgaaggagaacaaggagttgatgagggaggtgtttccaaagaattttttcagctggttgtggaggaaatcttcaatccagatattggtatgttcacatacgatgaatctacaaaattgttttggtttaatccatcttcttttgaaactgagggtcagtttactctgattggcatagtactgggtctggctatttacaataactgtatactggatgtacattttcccatggttgtctacaggaagctaatggggaaaaaaggaacttttcgtgacttgggagactctcacccagttctatatcagagtttaaaagatttattggagtatgaagggaatgtggaagatgacatgatgatcactttccagatatcacagacagatctttttggtaacccaatgatgtatgatctaaaggaaaatggtgataaaattccaattacaaatgaaaacaggaaggaatttgtcaatctttattctgactacattctcaataaatcagtagaaaaacagttcaaggcttttcggagaggttttcatatggtgaccaatgaatctcccttaaagtacttattcagaccagaagaaattgaattgcttatatgtggaagccggaatctagatttccaagcactagaagaaactacagaatatgacggtggctataccagggactctgttctgattagggagttctgggaaatcgttcattcatttacagatgaacagaaaagactcttcttgcagtttacaacgggcacagacagagcacctgtgggaggactaggaaaattaaagatgattatagccaaaaatggcccagacacagaaaggttacctacatctcatacttgctttaatgtgcttttacttccggaatactcaagcaaagaaaaacttaaagagagattgttgaaggccatcacgtatgccaaaggatttggcatgctgtaaaacaaaacaaaacaaaataaaacaaaaaaaaggaaggaaaaaaaaagaaaaaatttaaaaaattttaaaaatataacgagggataaatttttggtggtgatagtgtcccagtacaaaaaggctgtaagatagtcaaccacagtagtcacctatgtctgtgcctcccttctttattggggacatgtgggctggaacagcagatttcagctacatatatgaacaaatcctttattattattataattatttttttgcgtgaaagtgttacatattctttcacttgtatgtacagagaggtttttctgaatatttattttaagggttaaatcacttttgcttgtgtttattactgcttgaggttgagccttttgagtatttaaaaaatatataccaacagaactactctcccaaggaaaatattgccaccatttgtagaccacgtaaccttcaagtatgtgctacttttttgtccctgtatctaactcaaatcaggaactgtattttttttaatgatttgcttttgaaacttgaagtcttgaaaacagtgtgatgcaattactgctgttctagcccccaaagagttttctgtgcaaaatcttgagaatcaatcaataaagaaagatggaaggaagggagaaattggaatgttttaactgcagccctcagaactttagtaacagcacaacaaattaaaaacaaaaacaactcatgccacagtatgtcgtcttcatgtgtcttgcaatgaactgtttcagtagccaatcctctttcttagtatatgaaaggacagggatttttgttcttgttgttctcgttgttgttttaagtttactggggaaagtgcatttggccaaatgaaatggtagtcaagcctattgcaacaaagttaggaagtttgttgtttgtttattataaacaaaaagcatgtgaaagtgcacttaagatagagtttttattaattacttacttattacctagattttaaatagacaatccaaagtctccccttcgtgttgccatcatcttgttgaatcagccattttatcgaggcacgtgatcagtgttgcaacataatgaaaaagatggctactgtgccttgtgttacttaatcatacagtaagctgacctggaaatgaatgaaactattactcctaagaattacattgtatagccccacagattaaatttaattaattaattcaaaacatgttaaacgttactttcatgtactatggaaaagtacaagtaggtttacattactgatttccagaagtaagtagtttcccctttcctagtcttctgtgtatgtgatgttgttaatttcttttattgcattataaaataaaaggattatgtatttttaactaaggtgagacattgatatatccttttgctacaagctatagctaatgtgctgagcttgtgccttggtgattgattgattgattgactgattgttttaactgattactgtagatcaacctgatgatttgtttgtttgaaattggcaggaaaaatgcagctttcaaatcattggggggagaaaaaggatgtctttcaggattattttaattaatttttttcataattgagacagaactgtttgttatgtaccataatgctaaataaaactgtggcacttttcaccataatttaatttagtggaaaaagaagacaatgctttccatattgtgataaggtaacatggggtttttctgggccagcctttagaacactgttagggtacatacgctaccttgatgaaagggaccttcgtgcaactgtagtcatcttaaaggcttctcatccactgtgcttcttaatgtgtaattaaagtgaggagaaattaaatactctgagggcgttttatataataaattcgtgaagaaatgtgtgctcttcagttctcaagttttattattatggtatttattaaagttctacaattgtaataacgtatccatatgacaagttttaaagtggtaattgaaataggttatcagatatagagttgttcacatcaagtagacttttaacagagtcagaatgaacctacccttaaaattttagagaaaaaaaatcgtcggttgcacagaatagctgctctagcttgcttaattatgccgggcatgttgtcactcctcttacttttgctgccttttcattactatttaatggaatgtccctgaacaataaggaagagcaaaacatagacattttgactacagtggatacttcctctaccccaaatgttatgttataaaagtactttttttgcccaggtactctattatatattttggttttctttgaattagacctcaatctccaggaagctctggagggaaaaaaaggaaccataaactaaagtaactggttttccaaataaatgtaaacttttttaaccttttattattatagaacatttcaaacatacataaaacatgaaaacagcctgcagccaaacttttctggaccttggcagctccagcaaatgagctggtcatcctaaccctggtttcctgagacaactacttttggggatgcttgcttgtatagggagatgatagatagatagatacatatcaaaaagaaacttgaaaaaggcttcgaacagaacttgccgatgttactcatccctcctcggtacagacattctgttagaacagatggttgtaatggggcagcatcactccctattcccattaaaaacatgaccattctgagatttcaggccccttcgaggaatttttctcaagaattccatacaaactgtcagaggaagaaatgtcgtcccaagactagtccctgtgtagtcttgatccctttacctgcttactgtaattttttttctctgactttccgccagtgtctaagggccatctgtacccctcccacccttccatgagccactgtataatccaaaaacacaccttccatttgctccctcacttgtctccttttacctcaacagtgttagtgtgtaaagaattgcctggggagggtagagggttttacaagtacagagtcccaagtcttttctcccctccccgttagtgggttggcatttattaataggcactgcaagattttgatgcaggtgtggggtagatatcactgtgaaaggctactaatgcatggtagtttcaccgaaagtacagtcttcaaggatccttataatctcctcattgccaaaatcagtaacatctataaccttgacaacaccctagcttgggctgttgcttctctggctacttgtttttccatcccagtttacccagattttagatggatactcctccaattctgcttaaagtccttacctgttcttgcccagttccctctagtcaacctcagtcactcccaaagattcttccccaatcccatatcttttgctcagacctctgtctctgggatttctttgttacctcatagtcagtagtcctaaaaacaaaattcttcatcttgcatctctatcgaccgaccattctttgtttctttttaagaaatgtaaccttcaccccaatcatcaaaatctctcattcctcaattgtcacaggttgtcacttctttccccctaaacctctcccatcattccttccttctttatactgcccttacaggtcctgatcctctgactcacccggacattcttagcagctgcctaatttcactccctgactctcatctccctcttccaatccttttcattgtgctagaacactatcttgctaattttaatatcctctgcattcagtgcctccacagattgccccctcactgacctttccaatttggccttgtgttacacactttcctcgctgcattcctacccagcatcttcacttgtcatatttctcaaatactcttcatgaccagatatttaaagtacctcatccatgaagacttcatcaacccccaaagtgcctccaatgcttccgtggtagcacagcataatggggtacatttcttagttgaacagtgaggagtcactgggattcttacagagtgtcttagggtctcctcttgatactctttccacatttcagttaaggaattttcttacatctttttttcttctaataacctttgcctggagtgtaagtaaattcatgatagagactgtcatttttaaaaaaaaaaacaaaccattttgcctttcacatgttattacctccatctttctgttatcttgtcagtgttgccacctaaatgattgaaaatgaccgagcatgcagtagaatgtagtgaagtttcctatttcatccattttttgcataagtgcattggtatctgtatatccatctgcccaagcaccagttgttgaaaagactattatttccccatgaatggtcctggtacccttgtcaaagaacagttgaccataaatataagactttctggattctcagtcttactccattgccctatatgtctgtcgttataccagcaccgcactgtcttgatggctgtagcttggtagtaagtttagatttgggatgtgcaagtcctccattttttttttttttttccccaaaatcattttgtctgttttgggtcccttgcattgcatatgaatttttatatgatcattgtgtcaattcctgcaaaacagctgggatcttgatagggatttagttgaattggtagataaatttgagaaataactgctattttaatggtgttaggttttctgttccatgactgtgggatgtctttgcatttgcttaggtctttatttcagtgatgttttagagatttcagtgtgcaagtcttgacgtctttaatttttttctaagtattttactgatgccactttaattatatgattattttctaatttttatttttgtattcatcactggtgttagaaataaaattaatttttgtatattgattttgtatattgtagcttttctaaaattctttttttgtcacttagtattttttgcatatgagatcatgcatctgtgaacagaaatacttttacttcttcctttccagtctagattcctattatttcattttcttgccttagtgtgctggctagcacctccagtacaatattggatagaagtgacaagagcagacatctttttcttgttcctgattttaaggggaaagcattcagtctttcaccattgagtatgatgttagctagctgtgggtttgcttcaagttgaggaaattcttttattaaacctagtttactgagtgttttttaatcaaaaaaaaaaaaaggaggggctgtgggttttgttaaatgcttcttctgtatcaagattttcatgttgttttgtcctttattaatatgttgtattaatggacttttgtatattgaattaactttgcattcctgggataatctcagttgtccatgctacataaaccttgttctatgctgctgga

SEQ ID NO: 629 - DNA, 8893 bp, Homo sapiens
  source 1..8893: mol_type = genomic DNA
gctgcctgccgggatactcggcccgcccagccagtcctcccgtcttgcgccgcggccgcgagatccgtgtgtctcccaagatggtggcgctgggctcggggtgactacaggagacgacggggccttttcccttcgccaggacccgacacaccaggcttcgctcgctcgcgcacccctccgccgcgtagccatccgccagcgcgggcgcccgccatccgccgcctacttacgcttcacctctgccgacccggcgcgctcggctgcgggcggcggcgcctccttcggctcctcctcggaatagctcgcggcctgtagcccctggcaggagggcccctcagccccccggtgtggacaggcagcggcggctggcgacgaacgccgggatttcggcggccccggcgctccctttcccggcctcgttttccggataaggaagcgcgggtcccgcatgagccccggcggtggcggcagcgaaagagaacgaggcggtggcgggcggaggcggcgggcgagggcgactacgaccagtgaggcggccgccgcagcccaggcgcgggggcgacgacagaggggaggtatggtgtcaagaaaacatagtcaccattattacgaaaagtaaaatatggaagagatgatccctaccatcaatcagcttacaactagaggcactgacaaatgtatacagatagctgtaatgtaaggttaaaaatctgtaagagcctgattttagaattcaccagctcctcagaagtttggcgaaatatgagttattaagcctacgctcagatcaaggtagcagctagactggtgtgacaacctgtttttaatcagtgactcaaagctgtgatcaccctgatgtcaccgaatggccacagcttgtaaaagatcaggagaacctcagtctgacgacattgaagctagccgaatgaagcgagcagctgcaaagcatctaatagaacgctactaccaccagttaactgagggctgtggaaatgaagcctgcacgaatgagttttgtgcttcctgtccaacttttcttcgtatggataataatgcagcagctattaaagccctcgagctttataagattaatgcaaaactctgtgatcctcatccctccaagaaaggagcaagctcagcttaccttgagaactcgaaaggtgcccccaacaactcctgctctgagataaaaatgaacaagaaaggcgctagaattgattttaaagatgtgacttacttaacagaagagaaggtatatgaaattcttgaattatgtagagaaagagaggattattcccctttaatccgtgttattggaagagttttttctagtgctgaggcattggtacagagcttccggaaagttaaacaacacaccaaggaagaactgaaatctcttcaagcaaaagatgaagacaaagatgaagatgaaaaggaaaaagctgcatgttctgctgctgctatggaagaagactcagaagcatcttcctcaaggataggtgatagctcacagggagacaacaatttgcaaaaattaggccctgatgatgtgtctgtggatattgatgccattagaagggtctacaccagattgctctctaatgaaaaaattgaaactgcctttctcaatgcacttgtatatttgtcacctaacgtggaatgtgacttgacgtatcacaatgtatactctcgagatcctaattatctgaatttgttcattatcgtaatggagaatagaaatctccacagtcctgaatatctggaaatggctttgccattattttgcaaagcgatgagcaagctaccccttgcagcccaaggaaaactgatcagactgtggtctaaatacaatgcagaccagattcggagaatgatggagacatttcagcaacttattacttataaagtcataagcaatgaatttaacagtcgaaatctagtgaatgatgatgatgccattgttgctgcttcgaagtgcttgaaaatggtttactatgcaaatgtagtgggaggggaagtggacacaaatcacaatgaagaagatgatgaagagcccatccctgagtccagcgagctgacacttcaggaacttttgggagaagaaagaagaaacaagaaaggtcctcgagtggaccccctggaaactgaacttggtgttaaaaccctggattgtcgaaaaccacttatcccttttgaagagtttattaatgaaccactgaatgaggttctagaaatggataaagattatacttttttcaaagtagaaacagagaacaaattctcttttatgacatgtccctttatattgaatgctgtcacaaagaatttgggattatattatgacaatagaattcgcatgtacagtgaacgaagaatcactgttctctacagcttagttcaaggacagcagttgaatccatatttgagactcaaagttagacgtgaccatatcatagatgatgcacttgtccggctagagatgatcgctatggaaaatcctgcagacttgaagaagcagttgtatgtggaatttgaaggagaacaaggagttgatgagggaggtgtttccaaagaattttttcagctggttgtggaggaaatcttcaatccagatattggtatgttcacatacgatgaatctacaaaattgttttggtttaatccatcttcttttgaaactgagggtcagtttactctgattggcatagtactgggtctggctatttacaataactgtatactggatgtacattttcccatggttgtctacaggaagctaatggggaaaaaaggaacttttcgtgacttgggagactctcacccagttctatatcagagtttaaaagatttattggagtatgaagggaatgtggaagatgacatgatgatcactttccagatatcacagacagatctttttggtaacccaatgatgtatgatctaaaggaaaatggtgataaaattccaattacaaatgaaaacaggaaggaatttgtcaatctttattctgactacattctcaataaatcagtagaaaaacagttcaaggcttttcggagaggttttcatatggtgaccaatgaatctcccttaaagtacttattcagaccagaagaaattgaattgcttatatgtggaagccggaatctagatttccaagcactagaagaaactacagaatatgacggtggctataccagggactctgttctgattagggagttctgggaaatcgttcattcatttacagatgaacagaaaagactcttcttgcagtttacaacgggcacagacagagcacctgtgggaggactaggaaaattaaagatgattatagccaaaaatggcccagacacagaaaggttacctacatctcatacttgctttaatgtgcttttacttccggaatactcaagcaaagaaaaacttaaagagagattgttgaaggccatcacgtatgccaaaggatttggcatgctgtaaaacaaaacaaaacaaaataaaacaaaaaaaaggaaggaaaaaaaaagaaaaaatttaaaaaattttaaaaatataacgagggataaatttttggtggtgatagtgtcccagtacaaaaaggctgtaagatagtcaaccacagtagtcacctatgtctgtgcctcccttctttattggggacatgtgggctggaacagcagatttcagctacatatatgaacaaatcctttattattattataattatttttttgcgtgaaagtgttacatattctttcacttgtatgtacagagaggtttttctgaatatttattttaagggttaaatcacttttgcttgtgtttattactgcttgaggttgagccttttgagtatttaaaaaatatataccaacagaactactctcccaaggaaaatattgccaccatttgtagaccacgtaaccttcaagtatgtgctacttttttgtccctgtatctaactcaaatcaggaactgtattttttttaatgatttgcttttgaaacttgaagtcttgaaaacagtgtgatgcaattactgctgttctagcccccaaagagttttctgtgcaaaatcttgagaatcaatcaataaagaaagatggaaggaagggagaaattggaatgttttaactgcagccctcagaactttagtaacagcacaacaaattaaaaacaaaaacaactcatgccacagtatgtcgtcttcatgtgtcttgcaatgaactgtttcagtagccaatcctctttcttagtatatgaaaggacagggatttttgttcttgttgttctcgttgttgttttaagtttactggggaaagtgcatttggccaaatgaaatggtagtcaagcctattgcaacaaagttaggaagtttgttgtttgtttattataaacaaaaagcatgtgaaagtgcacttaagatagagtttttattaattacttacttattacctagattttaaatagacaatccaaagtctccccttcgtgttgccatcatcttgttgaatcagccattttatcgaggcacgtgatcagtgttgcaacataatgaaaaagatggctactgtgccttgtgttacttaatcatacagtaagctgacctggaaatgaatgaaactattactcctaagaattacattgtatagccccacagattaaatttaattaattaattcaaaacatgttaaacgttactttcatgtactatggaaaagtacaagtaggtttacattactgatttccagaagtaagtagtttcccctttcctagtcttctgtgtatgtgatgttgttaatttcttttattgcattataaaataaaaggattatgtatttttaactaaggtgagacattgatatatccttttgctacaagctatagctaatgtgctgagcttgtgccttggtgattgattgattgattgactgattgttttaactgattactgtagatcaacctgatgatttgtttgtttgaaattggcaggaaaaatgcagctttcaaatcattggggggagaaaaaggatgtctttcaggattattttaattaatttttttcataattgagacagaactgtttgttatgtaccataatgctaaataaaactgtggcacttttcaccataatttaatttagtggaaaaagaagacaatgctttccatattgtgataaggtaacatggggtttttctgggccagcctttagaacactgttagggtacatacgctaccttgatgaaagggaccttcgtgcaactgtagtcatcttaaaggcttctcatccactgtgcttcttaatgtgtaattaaagtgaggagaaattaaatactctgagggcgttttatataataaattcgtgaagaaatgtgtgctcttcagttctcaagttttattattatggtatttattaaagttctacaattgtaataacgtatccatatgacaagttttaaagtggtaattgaaataggttatcagatatagagttgttcacatcaagtagacttttaacagagtcagaatgaacctacccttaaaattttagagaaaaaaaatcgtcggttgcacagaatagctgctctagcttgcttaattatgccgggcatgttgtcactcctcttacttttgctgccttttcattactatttaatggaatgtccctgaacaataaggaagagcaaaacatagacattttgactacagtggatacttcctctaccccaaatgttatgttataaaagtactttttttgcccaggtactctattatatattttggttttctttgaattagacctcaatctccaggaagctctggagggaaaaaaaggaaccataaactaaagtaactggttttccaaataaatgtaaacttttttaaccttttattattatagaacatttcaaacatacataaaacatgaaaacagcctgcagccaaacttttctggaccttggcagctccagcaaatgagctggtcatcctaaccctggtttcctgagacaactacttttggggatgcttgcttgtatagggagatgatagatagatagatacatatcaaaaagaaacttgaaaaaggcttcgaacagaacttgccgatgttactcatccctcctcggtacagacattctgttagaacagatggttgtaatggggcagcatcactccctattcccattaaaaacatgaccattctgagatttcaggccccttcgaggaatttttctcaagaattccatacaaactgtcagaggaagaaatgtcgtcccaagactagtccctgtgtagtcttgatccctttacctgcttactgtaattttttttctctgactttccgccagtgtctaagggccatctgtacccctcccacccttccatgagccactgtataatccaaaaacacaccttccatttgctccctcacttgtctccttttacctcaacagtgttagtgtgtaaagaattgcctggggagggtagagggttttacaagtacagagtcccaagtcttttctcccctccccgttagtgggttggcatttattaataggcactgcaagattttgatgcaggtgtggggtagatatcactgtgaaaggctactaatgcatggtagtttcaccgaaagtacagtcttcaaggatccttataatctcctcattgccaaaatcagtaacatctataaccttgacaacaccctagcttgggctgttgcttctctggctacttgtttttccatcccagtttacccagattttagatggatactcctccaattctgcttaaagtccttacctgttcttgcccagttccctctagtcaacctcagtcactcccaaagattcttccccaatcccatatcttttgctcagacctctgtctctgggatttctttgttacctcatagtcagtagtcctaaaaacaaaattcttcatcttgcatctctatcgaccgaccattctttgtttctttttaagaaatgtaaccttcaccccaatcatcaaaatctctcattcctcaattgtcacaggttgtcacttctttccccctaaacctctcccatcattccttccttctttatactgcccttacaggtcctgatcctctgactcacccggacattcttagcagctgcctaatttcactccctgactctcatctccctcttccaatccttttcattgtgctagaacactatcttgctaattttaatatcctctgcattcagtgcctccacagattgccccctcactgacctttccaatttggccttgtgttacacactttcctcgctgcattcctacccagcatcttcacttgtcatatttctcaaatactcttcatgaccagatatttaaagtacctcatccatgaagacttcatcaacccccaaagtgcctccaatgcttccgtggtagcacagcataatggggtacatttcttagttgaacagtgaggagtcactgggattcttacagagtgtcttagggtctcctcttgatactctttccacatttcagttaaggaattttcttacatctttttttcttctaataacctttgcctggagtgtaagtaaattcatgatagagactgtcatttttaaaaaaaaaaacaaaccattttgcctttcacatgttattacctccatctttctgttatcttgtcagtgttgccacctaaatgattgaaaatgaccgagcatgcagtagaatgtagtgaagtttcctatttcatccattttttgcataagtgcattggtatctgtatatccatctgcccaagcaccagttgttgaaaagactattatttccccatgaatggtcctggtacccttgtcaaagaacagttgaccataaatataagactttctggattctcagtcttactccattgccctatatgtctgtcgttataccagcaccgcactgtcttgatggctgtagcttggtagtaagtttagatttgggatgtgcaagtcctccattttttttttttttttccccaaaatcattttgtctgttttgggtcccttgcattgcatatgaatttttatatgatcattgtgtcaattcctgcaaaacagctgggatcttgatagggatttagttgaattggtagataaatttgagaaataactgctattttaatggtgttaggttttctgttccatgactgtgggatgtctttgcatttgcttaggtctttatttcagtgatgttttagagatttcagtgtgcaagtcttgacgtctttaatttttttctaagtattttactgatgccactttaattatatgattattttctaatttttatttttgtattcatcactggtgttagaaataaaattaatttttgtatattgattttgtatattgtagcttttctaaaattctttttttgtcacttagtattttttgcatatgagatcatgcatctgtgaacagaaatacttttacttcttcctttccagtctagattcctattatttcattttcttgccttagtgtgctggctagcacctccagtacaatattggatagaagtgacaagagcagacatctttttcttgttcctgattttaaggggaaagcattcagtctttcaccattgagtatgatgttagctagctgtgggtttgcttcaagttgaggaaattcttttattaaacctagtttactgagtgttttttaatcaaaaaaaaaaaaaggaggggctgtgggttttgttaaatgcttcttctgtatcaagattttcatgttgttttgtcctttattaatatgttgtattaatggacttttgtatattgaattaactttgcattcctgggataatctcagttgtccatgctacataaaccttgttctatgctgctgga

SEQ ID NO: 630 - DNA, 8958 bp, Homo sapiens
  source 1..8958: mol_type = genomic DNA
gctgcctgccgggatactcggcccgcccagccagtcctcccgtcttgcgccgcggccgcgagatccgtgtgtctcccaagatggtggcgctgggctcggggtgactacaggagacgacggggccttttcccttcgccaggacccgacacaccaggcttcgctcgctcgcgcacccctccgccgcgtagccatccgccagcgcgggcgcccgccatccgccgcctacttacgcttcacctctgccgacccggcgcgctcggctgcgggcggcggcgcctccttcggctcctcctcggaatagctcgcggcctgtagcccctggcaggagggcccctcagccccccggtgtggacaggcagcggcggctggcgacgaacgccgggatttcggcggccccggcgctccctttcccggcctcgttttccggataaggaagcgcgggtcccgcatgagccccggcggtggcggcagcgaaagagaacgaggcggtggcgggcggaggcggcgggcgagggcgactacgaccagtgaggcggccgccgcagcccaggcgcgggggcgacgacagaggggaggtatggtgtcaagaaaacatagtcaccattattacgaaaagtaaaatatggaagagatgatccctaccatcaatcagcttacaactagaggcactgacaaatgtatacagatagctgtaatgtaaggttaaaaatctgtaagagcctgattttagaattcaccagctcctcagaagtttggcgaaatatgagttattaagcctacgctcagatcaaggtagcagctagactggtgtgacaacctgtttttaatcagtgactcaaagctgtgatcaccctgatgtcaccgaatggccacagcttgtaaaagagagttacagtggaggtaaaaggagtggcttgcaggatggagaagctgcaccagtgttattggaaatcaggagaacctcagtctgacgacattgaagctagccgaatgaagcgagcagctgcaaagcatctaatagaacgctactaccaccagttaactgagggctgtggaaatgaagcctgcacgaatgagttttgtgcttcctgtccaacttttcttcgtatggataataatgcagcagctattaaagccctcgagctttataagattaatgcaaaactctgtgatcctcatccctccaagaaaggagcaagctcagcttaccttgagaactcgaaaggtgcccccaacaactcctgctctgagataaaaatgaacaagaaaggcgctagaattgattttaaagatgtgacttacttaacagaagagaaggtatatgaaattcttgaattatgtagagaaagagaggattattcccctttaatccgtgttattggaagagttttttctagtgctgaggcattggtacagagcttccggaaagttaaacaacacaccaaggaagaactgaaatctcttcaagcaaaagatgaagacaaagatgaagatgaaaaggaaaaagctgcatgttctgctgctgctatggaagaagactcagaagcatcttcctcaaggataggtgatagctcacagggagacaacaatttgcaaaaattaggccctgatgatgtgtctgtggatattgatgccattagaagggtctacaccagattgctctctaatgaaaaaattgaaactgcctttctcaatgcacttgtatatttgtcacctaacgtggaatgtgacttgacgtatcacaatgtatactctcgagatcctaattatctgaatttgttcattatcgtaatggagaatagaaatctccacagtcctgaatatctggaaatggctttgccattattttgcaaagcgatgagcaagctaccccttgcagcccaaggaaaactgatcagactgtggtctaaatacaatgcagaccagattcggagaatgatggagacatttcagcaacttattacttataaagtcataagcaatgaatttaacagtcgaaatctagtgaatgatgatgatgccattgttgctgcttcgaagtgcttgaaaatggtttactatgcaaatgtagtgggaggggaagtggacacaaatcacaatgaagaagatgatgaagagcccatccctgagtccagcgagctgacacttcaggaacttttgggagaagaaagaagaaacaagaaaggtcctcgagtggaccccctggaaactgaacttggtgttaaaaccctggattgtcgaaaaccacttatcccttttgaagagtttattaatgaaccactgaatgaggttctagaaatggataaagattatacttttttcaaagtagaaacagagaacaaattctcttttatgacatgtccctttatattgaatgctgtcacaaagaatttgggattatattatgacaatagaattcgcatgtacagtgaacgaagaatcactgttctctacagcttagttcaaggacagcagttgaatccatatttgagactcaaagttagacgtgaccatatcatagatgatgcacttgtccggctagagatgatcgctatggaaaatcctgcagacttgaagaagcagttgtatgtggaatttgaaggagaacaaggagttgatgagggaggtgtttccaaagaattttttcagctggttgtggaggaaatcttcaatccagatattggtatgttcacatacgatgaatctacaaaattgttttggtttaatccatcttcttttgaaactgagggtcagtttactctgattggcatagtactgggtctggctatttacaataactgtatactggatgtacattttcccatggttgtctacaggaagctaatggggaaaaaaggaacttttcgtgacttgggagactctcacccagttctatatcagagtttaaaagatttattggagtatgaagggaatgtggaagatgacatgatgatcactttccagatatcacagacagatctttttggtaacccaatgatgtatgatctaaaggaaaatggtgataaaattccaattacaaatgaaaacaggaaggaatttgtcaatctttattctgactacattctcaataaatcagtagaaaaacagttcaaggcttttcggagaggttttcatatggtgaccaatgaatctcccttaaagtacttattcagaccagaagaaattgaattgcttatatgtggaagccggaatctagatttccaagcactagaagaaactacagaatatgacggtggctataccagggactctgttctgattagggagttctgggaaatcgttcattcatttacagatgaacagaaaagactcttcttgcagtttacaacgggcacagacagagcacctgtgggaggactaggaaaattaaagatgattatagccaaaaatggcccagacacagaaaggttacctacatctcatacttgctttaatgtgcttttacttccggaatactcaagcaaagaaaaacttaaagagagattgttgaaggccatcacgtatgccaaaggatttggcatgctgtaaaacaaaacaaaacaaaataaaacaaaaaaaaggaaggaaaaaaaaagaaaaaatttaaaaaattttaaaaatataacgagggataaatttttggtggtgatagtgtcccagtacaaaaaggctgtaagatagtcaaccacagtagtcacctatgtctgtgcctcccttctttattggggacatgtgggctggaacagcagatttcagctacatatatgaacaaatcctttattattattataattatttttttgcgtgaaagtgttacatattctttcacttgtatgtacagagaggtttttctgaatatttattttaagggttaaatcacttttgcttgtgtttattactgcttgaggttgagccttttgagtatttaaaaaatatataccaacagaactactctcccaaggaaaatattgccaccatttgtagaccacgtaaccttcaagtatgtgctacttttttgtccctgtatctaactcaaatcaggaactgtattttttttaatgatttgcttttgaaacttgaagtcttgaaaacagtgtgatgcaattactgctgttctagcccccaaagagttttctgtgcaaaatcttgagaatcaatcaataaagaaagatggaaggaagggagaaattggaatgttttaactgcagccctcagaactttagtaacagcacaacaaattaaaaacaaaaacaactcatgccacagtatgtcgtcttcatgtgtcttgcaatgaactgtttcagtagccaatcctctttcttagtatatgaaaggacagggatttttgttcttgttgttctcgttgttgttttaagtttactggggaaagtgcatttggccaaatgaaatggtagtcaagcctattgcaacaaagttaggaagtttgttgtttgtttattataaacaaaaagcatgtgaaagtgcacttaagatagagtttttattaattacttacttattacctagattttaaatagacaatccaaagtctccccttcgtgttgccatcatcttgttgaatcagccattttatcgaggcacgtgatcagtgttgcaacataatgaaaaagatggctactgtgccttgtgttacttaatcatacagtaagctgacctggaaatgaatgaaactattactcctaagaattacattgtatagccccacagattaaatttaattaattaattcaaaacatgttaaacgttactttcatgtactatggaaaagtacaagtaggtttacattactgatttccagaagtaagtagtttcccctttcctagtcttctgtgtatgtgatgttgttaatttcttttattgcattataaaataaaaggattatgtatttttaactaaggtgagacattgatatatccttttgctacaagctatagctaatgtgctgagcttgtgccttggtgattgattgattgattgactgattgttttaactgattactgtagatcaacctgatgatttgtttgtttgaaattggcaggaaaaatgcagctttcaaatcattggggggagaaaaaggatgtctttcaggattattttaattaatttttttcataattgagacagaactgtttgttatgtaccataatgctaaataaaactgtggcacttttcaccataatttaatttagtggaaaaagaagacaatgctttccatattgtgataaggtaacatggggtttttctgggccagcctttagaacactgttagggtacatacgctaccttgatgaaagggaccttcgtgcaactgtagtcatcttaaaggcttctcatccactgtgcttcttaatgtgtaattaaagtgaggagaaattaaatactctgagggcgttttatataataaattcgtgaagaaatgtgtgctcttcagttctcaagttttattattatggtatttattaaagttctacaattgtaataacgtatccatatgacaagttttaaagtggtaattgaaataggttatcagatatagagttgttcacatcaagtagacttttaacagagtcagaatgaacctacccttaaaattttagagaaaaaaaatcgtcggttgcacagaatagctgctctagcttgcttaattatgccgggcatgttgtcactcctcttacttttgctgccttttcattactatttaatggaatgtccctgaacaataaggaagagcaaaacatagacattttgactacagtggatacttcctctaccccaaatgttatgttataaaagtactttttttgcccaggtactctattatatattttggttttctttgaattagacctcaatctccaggaagctctggagggaaaaaaaggaaccataaactaaagtaactggttttccaaataaatgtaaacttttttaaccttttattattatagaacatttcaaacatacataaaacatgaaaacagcctgcagccaaacttttctggaccttggcagctccagcaaatgagctggtcatcctaaccctggtttcctgagacaactacttttggggatgcttgcttgtatagggagatgatagatagatagatacatatcaaaaagaaacttgaaaaaggcttcgaacagaacttgccgatgttactcatccctcctcggtacagacattctgttagaacagatggttgtaatggggcagcatcactccctattcccattaaaaacatgaccattctgagatttcaggccccttcgaggaatttttctcaagaattccatacaaactgtcagaggaagaaatgtcgtcccaagactagtccctgtgtagtcttgatccctttacctgcttactgtaattttttttctctgactttccgccagtgtctaagggccatctgtacccctcccacccttccatgagccactgtataatccaaaaacacaccttccatttgctccctcacttgtctccttttacctcaacagtgttagtgtgtaaagaattgcctggggagggtagagggttttacaagtacagagtcccaagtcttttctcccctccccgttagtgggttggcatttattaataggcactgcaagattttgatgcaggtgtggggtagatatcactgtgaaaggctactaatgcatggtagtttcaccgaaagtacagtcttcaaggatccttataatctcctcattgccaaaatcagtaacatctataaccttgacaacaccctagcttgggctgttgcttctctggctacttgtttttccatcccagtttacccagattttagatggatactcctccaattctgcttaaagtccttacctgttcttgcccagttccctctagtcaacctcagtcactcccaaagattcttccccaatcccatatcttttgctcagacctctgtctctgggatttctttgttacctcatagtcagtagtcctaaaaacaaaattcttcatcttgcatctctatcgaccgaccattctttgtttctttttaagaaatgtaaccttcaccccaatcatcaaaatctctcattcctcaattgtcacaggttgtcacttctttccccctaaacctctcccatcattccttccttctttatactgcccttacaggtcctgatcctctgactcacccggacattcttagcagctgcctaatttcactccctgactctcatctccctcttccaatccttttcattgtgctagaacactatcttgctaattttaatatcctctgcattcagtgcctccacagattgccccctcactgacctttccaatttggccttgtgttacacactttcctcgctgcattcctacccagcatcttcacttgtcatatttctcaaatactcttcatgaccagatatttaaagtacctcatccatgaagacttcatcaacccccaaagtgcctccaatgcttccgtggtagcacagcataatggggtacatttcttagttgaacagtgaggagtcactgggattcttacagagtgtcttagggtctcctcttgatactctttccacatttcagttaaggaattttcttacatctttttttcttctaataacctttgcctggagtgtaagtaaattcatgatagagactgtcatttttaaaaaaaaaaacaaaccattttgcctttcacatgttattacctccatctttctgttatcttgtcagtgttgccacctaaatgattgaaaatgaccgagcatgcagtagaatgtagtgaagtttcctatttcatccattttttgcataagtgcattggtatctgtatatccatctgcccaagcaccagttgttgaaaagactattatttccccatgaatggtcctggtacccttgtcaaagaacagttgaccataaatataagactttctggattctcagtcttactccattgccctatatgtctgtcgttataccagcaccgcactgtcttgatggctgtagcttggtagtaagtttagatttgggatgtgcaagtcctccattttttttttttttttccccaaaatcattttgtctgttttgggtcccttgcattgcatatgaatttttatatgatcattgtgtcaattcctgcaaaacagctgggatcttgatagggatttagttgaattggtagataaatttgagaaataactgctattttaatggtgttaggttttctgttccatgactgtgggatgtctttgcatttgcttaggtctttatttcagtgatgttttagagatttcagtgtgcaagtcttgacgtctttaatttttttctaagtattttactgatgccactttaattatatgattattttctaatttttatttttgtattcatcactggtgttagaaataaaattaatttttgtatattgattttgtatattgtagcttttctaaaattctttttttgtcacttagtattttttgcatatgagatcatgcatctgtgaacagaaatacttttacttcttcctttccagtctagattcctattatttcattttcttgccttagtgtgctggctagcacctccagtacaatattggatagaagtgacaagagcagacatctttttcttgttcctgattttaaggggaaagcattcagtctttcaccattgagtatgatgttagctagctgtgggtttgcttcaagttgaggaaattcttttattaaacctagtttactgagtgttttttaatcaaaaaaaaaaaaaggaggggctgtgggttttgttaaatgcttcttctgtatcaagattttcatgttgttttgtcctttattaatatgttgtattaatggacttttgtatattgaattaactttgcattcctgggataatctcagttgtccatgctacataaaccttgttctatgctgctgga

SEQ ID NO: 631 - DNA, 8502 bp, Homo sapiens
  source 1..8502: mol_type = genomic DNA
agtcctcccgtcttgcgccgcggccgcgagatccgtgtgtctcccaagatggtggcgctgggctcggggtgactacaggagacgacggggccttttcccttcgccaggacccgacacaccaggcttcgctcgctcgcgcacccctccgccgcgtagccatccgccagcgcgggcgcccgccatccgccgcctacttacgcttcacctctgccgacccggcgcgctcggctgcgggcggcggcgcctccttcggctcctcctcggaatagctcgcggcctgtagcccctggcaggagggcccctcagccccccggtgtggacaggcagcggcggctggcgacgaacgccgggatttcggcggccccggcgctccctttcccggcctcgttttccggataaggaagcgcgggtcccgcatgagccccggcggtggcggcagcgaaagagaacgaggcggtggcgggcggaggcggcgggcgagggcgactacgaccagtgaggcggccgccgcagcccaggcgcgggggcgacgacaggaagcgagcagctgcaaagcatctaatagaacgctactaccaccagttaactgagggctgtggaaatgaagcctgcacgaatgagttttgtgcttcctgtccaacttttcttcgtatggataataatgcagcagctattaaagccctcgagctttataagattaatgcaaaactctgtgatcctcatccctccaagaaaggagcaagctcagcttaccttgagaactcgaaaggtgcccccaacaactcctgctctgagataaaaatgaacaagaaaggcgctagaattgattttaaagatgtgacttacttaacagaagagaaggtatatgaaattcttgaattatgtagagaaagagaggattattcccctttaatccgtgttattggaagagttttttctagtgctgaggcattggtacagagcttccggaaagttaaacaacacaccaaggaagaactgaaatctcttcaagcaaaagatgaagacaaagatgaagatgaaaaggaaaaagctgcatgttctgctgctgctatggaagaagactcagaagcatcttcctcaaggataggtgatagctcacagggagacaacaatttgcaaaaattaggccctgatgatgtgtctgtggatattgatgccattagaagggtctacaccagattgctctctaatgaaaaaattgaaactgcctttctcaatgcacttgtatatttgtcacctaacgtggaatgtgacttgacgtatcacaatgtatactctcgagatcctaattatctgaatttgttcattatcgtaatggagaatagaaatctccacagtcctgaatatctggaaatggctttgccattattttgcaaagcgatgagcaagctaccccttgcagcccaaggaaaactgatcagactgtggtctaaatacaatgcagaccagattcggagaatgatggagacatttcagcaacttattacttataaagtcataagcaatgaatttaacagtcgaaatctagtgaatgatgatgatgccattgttgctgcttcgaagtgcttgaaaatggtttactatgcaaatgtagtgggaggggaagtggacacaaatcacaatgaagaagatgatgaagagcccatccctgagtccagcgagctgacacttcaggaacttttgggagaagaaagaagaaacaagaaaggtcctcgagtggaccccctggaaactgaacttggtgttaaaaccctggattgtcgaaaaccacttatcccttttgaagagtttattaatgaaccactgaatgaggttctagaaatggataaagattatacttttttcaaagtagaaacagagaacaaattctcttttatgacatgtccctttatattgaatgctgtcacaaagaatttgggattatattatgacaatagaattcgcatgtacagtgaacgaagaatcactgttctctacagcttagttcaaggacagcagttgaatccatatttgagactcaaagttagacgtgaccatatcatagatgatgcacttgtccggctagagatgatcgctatggaaaatcctgcagacttgaagaagcagttgtatgtggaatttgaaggagaacaaggagttgatgagggaggtgtttccaaagaattttttcagctggttgtggaggaaatcttcaatccagatattggtatgttcacatacgatgaatctacaaaattgttttggtttaatccatcttcttttgaaactgagggtcagtttactctgattggcatagtactgggtctggctatttacaataactgtatactggatgtacattttcccatggttgtctacaggaagctaatggggaaaaaaggaacttttcgtgacttgggagactctcacccagttctatatcagagtttaaaagatttattggagtatgaagggaatgtggaagatgacatgatgatcactttccagatatcacagacagatctttttggtaacccaatgatgtatgatctaaaggaaaatggtgataaaattccaattacaaatgaaaacaggaaggaatttgtcaatctttattctgactacattctcaataaatcagtagaaaaacagttcaaggcttttcggagaggttttcatatggtgaccaatgaatctcccttaaagtacttattcagaccagaagaaattgaattgcttatatgtggaagccggaatctagatttccaagcactagaagaaactacagaatatgacggtggctataccagggactctgttctgattagggagttctgggaaatcgttcattcatttacagatgaacagaaaagactcttcttgcagtttacaacgggcacagacagagcacctgtgggaggactaggaaaattaaagatgattatagccaaaaatggcccagacacagaaaggttacctacatctcatacttgctttaatgtgcttttacttccggaatactcaagcaaagaaaaacttaaagagagattgttgaaggccatcacgtatgccaaaggatttggcatgctgtaaaacaaaacaaaacaaaataaaacaaaaaaaaggaaggaaaaaaaaagaaaaaatttaaaaaattttaaaaatataacgagggataaatttttggtggtgatagtgtcccagtacaaaaaggctgtaagatagtcaaccacagtagtcacctatgtctgtgcctcccttctttattggggacatgtgggctggaacagcagatttcagctacatatatgaacaaatcctttattattattataattatttttttgcgtgaaagtgttacatattctttcacttgtatgtacagagaggtttttctgaatatttattttaagggttaaatcacttttgcttgtgtttattactgcttgaggttgagccttttgagtatttaaaaaatatataccaacagaactactctcccaaggaaaatattgccaccatttgtagaccacgtaaccttcaagtatgtgctacttttttgtccctgtatctaactcaaatcaggaactgtattttttttaatgatttgcttttgaaacttgaagtcttgaaaacagtgtgatgcaattactgctgttctagcccccaaagagttttctgtgcaaaatcttgagaatcaatcaataaagaaagatggaaggaagggagaaattggaatgttttaactgcagccctcagaactttagtaacagcacaacaaattaaaaacaaaaacaactcatgccacagtatgtcgtcttcatgtgtcttgcaatgaactgtttcagtagccaatcctctttcttagtatatgaaaggacagggatttttgttcttgttgttctcgttgttgttttaagtttactggggaaagtgcatttggccaaatgaaatggtagtcaagcctattgcaacaaagttaggaagtttgttgtttgtttattataaacaaaaagcatgtgaaagtgcacttaagatagagtttttattaattacttacttattacctagattttaaatagacaatccaaagtctccccttcgtgttgccatcatcttgttgaatcagccattttatcgaggcacgtgatcagtgttgcaacataatgaaaaagatggctactgtgccttgtgttacttaatcatacagtaagctgacctggaaatgaatgaaactattactcctaagaattacattgtatagccccacagattaaatttaattaattaattcaaaacatgttaaacgttactttcatgtactatggaaaagtacaagtaggtttacattactgatttccagaagtaagtagtttcccctttcctagtcttctgtgtatgtgatgttgttaatttcttttattgcattataaaataaaaggattatgtatttttaactaaggtgagacattgatatatccttttgctacaagctatagctaatgtgctgagcttgtgccttggtgattgattgattgattgactgattgttttaactgattactgtagatcaacctgatgatttgtttgtttgaaattggcaggaaaaatgcagctttcaaatcattggggggagaaaaaggatgtctttcaggattattttaattaatttttttcataattgagacagaactgtttgttatgtaccataatgctaaataaaactgtggcacttttcaccataatttaatttagtggaaaaagaagacaatgctttccatattgtgataaggtaacatggggtttttctgggccagcctttagaacactgttagggtacatacgctaccttgatgaaagggaccttcgtgcaactgtagtcatcttaaaggcttctcatccactgtgcttcttaatgtgtaattaaagtgaggagaaattaaatactctgagggcgttttatataataaattcgtgaagaaatgtgtgctcttcagttctcaagttttattattatggtatttattaaagttctacaattgtaataacgtatccatatgacaagttttaaagtggtaattgaaataggttatcagatatagagttgttcacatcaagtagacttttaacagagtcagaatgaacctacccttaaaattttagagaaaaaaaatcgtcggttgcacagaatagctgctctagcttgcttaattatgccgggcatgttgtcactcctcttacttttgctgccttttcattactatttaatggaatgtccctgaacaataaggaagagcaaaacatagacattttgactacagtggatacttcctctaccccaaatgttatgttataaaagtactttttttgcccaggtactctattatatattttggttttctttgaattagacctcaatctccaggaagctctggagggaaaaaaaggaaccataaactaaagtaactggttttccaaataaatgtaaacttttttaaccttttattattatagaacatttcaaacatacataaaacatgaaaacagcctgcagccaaacttttctggaccttggcagctccagcaaatgagctggtcatcctaaccctggtttcctgagacaactacttttggggatgcttgcttgtatagggagatgatagatagatagatacatatcaaaaagaaacttgaaaaaggcttcgaacagaacttgccgatgttactcatccctcctcggtacagacattctgttagaacagatggttgtaatggggcagcatcactccctattcccattaaaaacatgaccattctgagatttcaggccccttcgaggaatttttctcaagaattccatacaaactgtcagaggaagaaatgtcgtcccaagactagtccctgtgtagtcttgatccctttacctgcttactgtaattttttttctctgactttccgccagtgtctaagggccatctgtacccctcccacccttccatgagccactgtataatccaaaaacacaccttccatttgctccctcacttgtctccttttacctcaacagtgttagtgtgtaaagaattgcctggggagggtagagggttttacaagtacagagtcccaagtcttttctcccctccccgttagtgggttggcatttattaataggcactgcaagattttgatgcaggtgtggggtagatatcactgtgaaaggctactaatgcatggtagtttcaccgaaagtacagtcttcaaggatccttataatctcctcattgccaaaatcagtaacatctataaccttgacaacaccctagcttgggctgttgcttctctggctacttgtttttccatcccagtttacccagattttagatggatactcctccaattctgcttaaagtccttacctgttcttgcccagttccctctagtcaacctcagtcactcccaaagattcttccccaatcccatatcttttgctcagacctctgtctctgggatttctttgttacctcatagtcagtagtcctaaaaacaaaattcttcatcttgcatctctatcgaccgaccattctttgtttctttttaagaaatgtaaccttcaccccaatcatcaaaatctctcattcctcaattgtcacaggttgtcacttctttccccctaaacctctcccatcattccttccttctttatactgcccttacaggtcctgatcctctgactcacccggacattcttagcagctgcctaatttcactccctgactctcatctccctcttccaatccttttcattgtgctagaacactatcttgctaattttaatatcctctgcattcagtgcctccacagattgccccctcactgacctttccaatttggccttgtgttacacactttcctcgctgcattcctacccagcatcttcacttgtcatatttctcaaatactcttcatgaccagatatttaaagtacctcatccatgaagacttcatcaacccccaaagtgcctccaatgcttccgtggtagcacagcataatggggtacatttcttagttgaacagtgaggagtcactgggattcttacagagtgtcttagggtctcctcttgatactctttccacatttcagttaaggaattttcttacatctttttttcttctaataacctttgcctggagtgtaagtaaattcatgatagagactgtcatttttaaaaaaaaaaacaaaccattttgcctttcacatgttattacctccatctttctgttatcttgtcagtgttgccacctaaatgattgaaaatgaccgagcatgcagtagaatgtagtgaagtttcctatttcatccattttttgcataagtgcattggtatctgtatatccatctgcccaagcaccagttgttgaaaagactattatttccccatgaatggtcctggtacccttgtcaaagaacagttgaccataaatataagactttctggattctcagtcttactccattgccctatatgtctgtcgttataccagcaccgcactgtcttgatggctgtagcttggtagtaagtttagatttgggatgtgcaagtcctccattttttttttttttttccccaaaatcattttgtctgttttgggtcccttgcattgcatatgaatttttatatgatcattgtgtcaattcctgcaaaacagctgggatcttgatagggatttagttgaattggtagataaatttgagaaataactgctattttaatggtgttaggttttctgttccatgactgtgggatgtctttgcatttgcttaggtctttatttcagtgatgttttagagatttcagtgtgcaagtcttgacgtctttaatttttttctaagtattttactgatgccactttaattatatgattattttctaatttttatttttgtattcatcactggtgttagaaataaaattaatttttgtatattgattttgtatattgtagcttttctaaaattctttttttgtcacttagtattttttgcatatgagatcatgcatctgtgaacagaaatacttttacttcttcctttccagtctagattcctattatttcattttcttgccttagtgtgctggctagcacctccagtacaatattggatagaagtgacaagagcagacatctttttcttgttcctgattttaaggggaaagcattcagtctttcaccattgagtatgatgttagctagctgtgggtttgcttcaagttgaggaaattcttttattaaacctagtttactgagtgttttttaatcaaaaaaaaaaaaaggaggggctgtgggttttgttaaatgcttcttctgtatcaagattttcatgttgttttgtcctttattaatatgttgtattaatggacttttgtatattgaattaactttgcattcctgggataatctcagttgtccatgctacataaaccttgttctatgctgctgga

SEQ ID NO: 632 - DNA, 7293 bp, Homo sapiens
  source 1..7293: mol_type = genomic DNA
agtcctcccgtcttgcgccgcggccgcgagatccgtgtgtctcccaagatggtggcgctgggctcggggtgactacaggagacgacggggccttttcccttcgccaggacccgacacaccaggcttcgctcgctcgcgcacccctccgccgcgtagccatccgccagcgcgggcgcccgccatccgccgcctacttacgcttcacctctgccgacccggcgcgctcggctgcgggcggcggcgcctccttcggctcctcctcggaatagctcgcggcctgtagcccctggcaggagggcccctcagccccccggtgtggacaggcagcggcggctggcgacgaacgccgggatttcggcggccccggcgctccctttcccggcctcgttttccggataaggaagcgcgggtcccgcatgagccccggcggtggcggcagcgaaagagaacgaggcggtggcgggcggaggcggcgggcgagggcgactacgaccagtgaggcggccgccgcagcccaggcgcgggggcgacgacagatcaggagaacctcagtctgacgacattgaagctagccgaatgaagcgagcagctgcaaagcatctaatagaacgctactaccaccagttaactgagggctgtggaaatgaagcctgcacgaatgagttttgtgcttcctgtccaacttttcttcgtatggataataatgcagcagctattaaagccctcgagctttataagattaatgcaaaactctgtgatcctcatccctccaagaaaggagcaagctcagcttaccttgagaactcgaaaggtgcccccaacaactcctgctctgagataaaaatgaacaagaaaggcgctagaattgattttaaagagatgatcgctatggaaaatcctgcagacttgaagaagcagttgtatgtggaatttgaaggagaacaaggagttgatgagggaggtgtttccaaagaattttttcagctggttgtggaggaaatcttcaatccagatattggtatgttcacatacgatgaatctacaaaattgttttggtttaatccatcttcttttgaaactgagggtcagtttactctgattggcatagtactgggtctggctatttacaataactgtatactggatgtacattttcccatggttgtctacaggaagctaatggggaaaaaaggaacttttcgtgacttgggagactctcacccagttctatatcagagtttaaaagatttattggagtatgaagggaatgtggaagatgacatgatgatcactttccagatatcacagacagatctttttggtaacccaatgatgtatgatctaaaggaaaatggtgataaaattccaattacaaatgaaaacaggaaggaatttgtcaatctttattctgactacattctcaataaatcagtagaaaaacagttcaaggcttttcggagaggttttcatatggtgaccaatgaatctcccttaaagtacttattcagaccagaagaaattgaattgcttatatgtggaagccggaatctagatttccaagcactagaagaaactacagaatatgacggtggctataccagggactctgttctgattagggagttctgggaaatcgttcattcatttacagatgaacagaaaagactcttcttgcagtttacaacgggcacagacagagcacctgtgggaggactaggaaaattaaagatgattatagccaaaaatggcccagacacagaaaggttacctacatctcatacttgctttaatgtgcttttacttccggaatactcaagcaaagaaaaacttaaagagagattgttgaaggccatcacgtatgccaaaggatttggcatgctgtaaaacaaaacaaaacaaaataaaacaaaaaaaaggaaggaaaaaaaaagaaaaaatttaaaaaattttaaaaatataacgagggataaatttttggtggtgatagtgtcccagtacaaaaaggctgtaagatagtcaaccacagtagtcacctatgtctgtgcctcccttctttattggggacatgtgggctggaacagcagatttcagctacatatatgaacaaatcctttattattattataattatttttttgcgtgaaagtgttacatattctttcacttgtatgtacagagaggtttttctgaatatttattttaagggttaaatcacttttgcttgtgtttattactgcttgaggttgagccttttgagtatttaaaaaatatataccaacagaactactctcccaaggaaaatattgccaccatttgtagaccacgtaaccttcaagtatgtgctacttttttgtccctgtatctaactcaaatcaggaactgtattttttttaatgatttgcttttgaaacttgaagtcttgaaaacagtgtgatgcaattactgctgttctagcccccaaagagttttctgtgcaaaatcttgagaatcaatcaataaagaaagatggaaggaagggagaaattggaatgttttaactgcagccctcagaactttagtaacagcacaacaaattaaaaacaaaaacaactcatgccacagtatgtcgtcttcatgtgtcttgcaatgaactgtttcagtagccaatcctctttcttagtatatgaaaggacagggatttttgttcttgttgttctcgttgttgttttaagtttactggggaaagtgcatttggccaaatgaaatggtagtcaagcctattgcaacaaagttaggaagtttgttgtttgtttattataaacaaaaagcatgtgaaagtgcacttaagatagagtttttattaattacttacttattacctagattttaaatagacaatccaaagtctccccttcgtgttgccatcatcttgttgaatcagccattttatcgaggcacgtgatcagtgttgcaacataatgaaaaagatggctactgtgccttgtgttacttaatcatacagtaagctgacctggaaatgaatgaaactattactcctaagaattacattgtatagccccacagattaaatttaattaattaattcaaaacatgttaaacgttactttcatgtactatggaaaagtacaagtaggtttacattactgatttccagaagtaagtagtttcccctttcctagtcttctgtgtatgtgatgttgttaatttcttttattgcattataaaataaaaggattatgtatttttaactaaggtgagacattgatatatccttttgctacaagctatagctaatgtgctgagcttgtgccttggtgattgattgattgattgactgattgttttaactgattactgtagatcaacctgatgatttgtttgtttgaaattggcaggaaaaatgcagctttcaaatcattggggggagaaaaaggatgtctttcaggattattttaattaatttttttcataattgagacagaactgtttgttatgtaccataatgctaaataaaactgtggcacttttcaccataatttaatttagtggaaaaagaagacaatgctttccatattgtgataaggtaacatggggtttttctgggccagcctttagaacactgttagggtacatacgctaccttgatgaaagggaccttcgtgcaactgtagtcatcttaaaggcttctcatccactgtgcttcttaatgtgtaattaaagtgaggagaaattaaatactctgagggcgttttatataataaattcgtgaagaaatgtgtgctcttcagttctcaagttttattattatggtatttattaaagttctacaattgtaataacgtatccatatgacaagttttaaagtggtaattgaaataggttatcagatatagagttgttcacatcaagtagacttttaacagagtcagaatgaacctacccttaaaattttagagaaaaaaaatcgtcggttgcacagaatagctgctctagcttgcttaattatgccgggcatgttgtcactcctcttacttttgctgccttttcattactatttaatggaatgtccctgaacaataaggaagagcaaaacatagacattttgactacagtggatacttcctctaccccaaatgttatgttataaaagtactttttttgcccaggtactctattatatattttggttttctttgaattagacctcaatctccaggaagctctggagggaaaaaaaggaaccataaactaaagtaactggttttccaaataaatgtaaacttttttaaccttttattattatagaacatttcaaacatacataaaacatgaaaacagcctgcagccaaacttttctggaccttggcagctccagcaaatgagctggtcatcctaaccctggtttcctgagacaactacttttggggatgcttgcttgtatagggagatgatagatagatagatacatatcaaaaagaaacttgaaaaaggcttcgaacagaacttgccgatgttactcatccctcctcggtacagacattctgttagaacagatggttgtaatggggcagcatcactccctattcccattaaaaacatgaccattctgagatttcaggccccttcgaggaatttttctcaagaattccatacaaactgtcagaggaagaaatgtcgtcccaagactagtccctgtgtagtcttgatccctttacctgcttactgtaattttttttctctgactttccgccagtgtctaagggccatctgtacccctcccacccttccatgagccactgtataatccaaaaacacaccttccatttgctccctcacttgtctccttttacctcaacagtgttagtgtgtaaagaattgcctggggagggtagagggttttacaagtacagagtcccaagtcttttctcccctccccgttagtgggttggcatttattaataggcactgcaagattttgatgcaggtgtggggtagatatcactgtgaaaggctactaatgcatggtagtttcaccgaaagtacagtcttcaaggatccttataatctcctcattgccaaaatcagtaacatctataaccttgacaacaccctagcttgggctgttgcttctctggctacttgtttttccatcccagtttacccagattttagatggatactcctccaattctgcttaaagtccttacctgttcttgcccagttccctctagtcaacctcagtcactcccaaagattcttccccaatcccatatcttttgctcagacctctgtctctgggatttctttgttacctcatagtcagtagtcctaaaaacaaaattcttcatcttgcatctctatcgaccgaccattctttgtttctttttaagaaatgtaaccttcaccccaatcatcaaaatctctcattcctcaattgtcacaggttgtcacttctttccccctaaacctctcccatcattccttccttctttatactgcccttacaggtcctgatcctctgactcacccggacattcttagcagctgcctaatttcactccctgactctcatctccctcttccaatccttttcattgtgctagaacactatcttgctaattttaatatcctctgcattcagtgcctccacagattgccccctcactgacctttccaatttggccttgtgttacacactttcctcgctgcattcctacccagcatcttcacttgtcatatttctcaaatactcttcatgaccagatatttaaagtacctcatccatgaagacttcatcaacccccaaagtgcctccaatgcttccgtggtagcacagcataatggggtacatttcttagttgaacagtgaggagtcactgggattcttacagagtgtcttagggtctcctcttgatactctttccacatttcagttaaggaattttcttacatctttttttcttctaataacctttgcctggagtgtaagtaaattcatgatagagactgtcatttttaaaaaaaaaaacaaaccattttgcctttcacatgttattacctccatctttctgttatcttgtcagtgttgccacctaaatgattgaaaatgaccgagcatgcagtagaatgtagtgaagtttcctatttcatccattttttgcataagtgcattggtatctgtatatccatctgcccaagcaccagttgttgaaaagactattatttccccatgaatggtcctggtacccttgtcaaagaacagttgaccataaatataagactttctggattctcagtcttactccattgccctatatgtctgtcgttataccagcaccgcactgtcttgatggctgtagcttggtagtaagtttagatttgggatgtgcaagtcctccattttttttttttttttccccaaaatcattttgtctgttttgggtcccttgcattgcatatgaatttttatatgatcattgtgtcaattcctgcaaaacagctgggatcttgatagggatttagttgaattggtagataaatttgagaaataactgctattttaatggtgttaggttttctgttccatgactgtgggatgtctttgcatttgcttaggtctttatttcagtgatgttttagagatttcagtgtgcaagtcttgacgtctttaatttttttctaagtattttactgatgccactttaattatatgattattttctaatttttatttttgtattcatcactggtgttagaaataaaattaatttttgtatattgattttgtatattgtagcttttctaaaattctttttttgtcacttagtattttttgcatatgagatcatgcatctgtgaacagaaatacttttacttcttcctttccagtctagattcctattatttcattttcttgccttagtgtgctggctagcacctccagtacaatattggatagaagtgacaagagcagacatctttttcttgttcctgattttaaggggaaagcattcagtctttcaccattgagtatgatgttagctagctgtgggtttgcttcaagttgaggaaattcttttattaaacctagtttactgagtgttttttaatcaaaaaaaaaaaaaggaggggctgtgggttttgttaaatgcttcttctgtatcaagattttcatgttgttttgtcctttattaatatgttgtattaatggacttttgtatattgaattaactttgcattcctgggataatctcagttgtccatgctacataaaccttgttctatgctgctgga

SEQ ID NO: 633 - DNA, 8379 bp, Homo sapiens
  source 1..8379: mol_type = genomic DNA
agtcctcccgtcttgcgccgcggccgcgagatccgtgtgtctcccaagatggtggcgctgggctcggggtgactacaggagacgacggggccttttcccttcgccaggacccgacacaccaggcttcgctcgctcgcgcacccctccgccgcgtagccatccgccagcgcgggcgcccgccatccgccgcctacttacgcttcacctctgccgacccggcgcgctcggctgcgggcggcggcgcctccttcggctcctcctcggaatagctcgcggcctgtagcccctggcaggagggcccctcagccccccggtgtggacaggcagcggcggctggcgacgaacgccgggatttcggcggccccggcgctccctttcccggcctcgttttccggataaggaagcgcgggtcccgcatgagccccggcggtggcggcagcgaaagagaacgaggcggtggcgggcggaggcggcgggcgagggcgactacgaccagtgaggcggccgccgcagcccaggcgcgggggcgacgacagatcaggagaacctcagtctgacgacattgaagctagccgaatgaagcgagcagctgcaaagcatctaatagaacgctactaccaccagttaactgagggctgtggaaatgaagcctgcacgaatgagttttgtgcttcctgtccaacttttcttcgtatggataataatgcagcagctattaaagccctcgagctttataagattaatgcaaaactctgtgatcctcatccctccaagaaaggagcaagctcagcttaccttgagaactcgaaaggtgcccccaacaactcctgctctgagataaaaatgaacaagaaaggcgctagaattgattttaaagatgtgacttacttaacagaagagaaggtatatgaaattcttgaattatgtagagaaagagaggattattcccctttaatccgtgttattggaagagttttttctagtgctgaggcattggtacagagcttccggaaagttaaacaacacaccaaggaagaactgaaatctcttcaagcaaaagatgaagacaaagatgaagatgaaaaggaaaaagctgcatgttctgctgctgctatggaagaagactcagaagcatcttcctcaaggataggtgatagctcacagggagacaacaatttgcaaaaattaggccctgatgatgtgtctgtggatattgatgccattagaagggtctacaccagattgctctctaatgaaaaaattgaaactgcctttctcaatgcacttgtatatttgtcacctaacgtggaatgtgacttgacgtatcacaatgtatactctcgagatcctaattatctgaatttgttcattatcgtaatggagaatagaaatctccacagtcctgaatatctggaaatggctttgccattattttgcaaagcgatgagcaagctaccccttgcagcccaaggaaaactgatcagactgtggtctaaatacaatgcagaccagattcggagaatgatggagacatttcagcaacttattacttataaagtcataagcaatgaatttaacagtcgaaatctagtgaatgatgatgatgccattgttgctgcttcgaagtgcttgaaaatggtttactatgcaaatgtagtgggaggggaagtggacacaaatcacaatgaagaagatgatgaagagcccatccctgagtccagcgagctgacacttcaggaacttttgggagaagaaagaagaaacaagaaaggtcctcgagtggaccccctggaaactgaacttggtgttaaaaccctggattgtcgaaaaccacttatcccttttgaagagtttattaatgaaccactgaatgaggttctagaaatggataaagattatacttttttcaaagtagaaacagagaacaaattctcttttatgacatgtccctttatattgaatgctgtcacaaagaatttgggattatattatgacaatagaattcgcatgtacagtgaacgaagaatcactgttctctacagcttagttcaaggacagcagttgaatccatatttgagactcaaagttagacgtgaccatatcatagatgatgcacttgtccggctagagatgatcgctatggaaaatcctgcagacttgaagaagcagttgtatgtggaatttgaaggagaacaaggagttgatgagggaggtgtttccaaagaattttttcagctggttgtggaggaaatcttcaatccagatattggtatgttcacatacgatgaatctacaaaattgttttggtttaatccatcttcttttgaaactgagggtcagtttactctgattggcatagtactgggtctggctatttacaataactgtatactggatgtacattttcccatggttgtctacaggaagctaatggggaaaaaaggaacttttcgtgacttgggagactctcacccagaatttgtcaatctttattctgactacattctcaataaatcagtagaaaaacagttcaaggcttttcggagaggttttcatatggtgaccaatgaatctcccttaaagtacttattcagaccagaagaaattgaattgcttatatgtggaagccggaatctagatttccaagcactagaagaaactacagaatatgacggtggctataccagggactctgttctgattagggagttctgggaaatcgttcattcatttacagatgaacagaaaagactcttcttgcagtttacaacgggcacagacagagcacctgtgggaggactaggaaaattaaagatgattatagccaaaaatggcccagacacagaaaggttacctacatctcatacttgctttaatgtgcttttacttccggaatactcaagcaaagaaaaacttaaagagagattgttgaaggccatcacgtatgccaaaggatttggcatgctgtaaaacaaaacaaaacaaaataaaacaaaaaaaaggaaggaaaaaaaaagaaaaaatttaaaaaattttaaaaatataacgagggataaatttttggtggtgatagtgtcccagtacaaaaaggctgtaagatagtcaaccacagtagtcacctatgtctgtgcctcccttctttattggggacatgtgggctggaacagcagatttcagctacatatatgaacaaatcctttattattattataattatttttttgcgtgaaagtgttacatattctttcacttgtatgtacagagaggtttttctgaatatttattttaagggttaaatcacttttgcttgtgtttattactgcttgaggttgagccttttgagtatttaaaaaatatataccaacagaactactctcccaaggaaaatattgccaccatttgtagaccacgtaaccttcaagtatgtgctacttttttgtccctgtatctaactcaaatcaggaactgtattttttttaatgatttgcttttgaaacttgaagtcttgaaaacagtgtgatgcaattactgctgttctagcccccaaagagttttctgtgcaaaatcttgagaatcaatcaataaagaaagatggaaggaagggagaaattggaatgttttaactgcagccctcagaactttagtaacagcacaacaaattaaaaacaaaaacaactcatgccacagtatgtcgtcttcatgtgtcttgcaatgaactgtttcagtagccaatcctctttcttagtatatgaaaggacagggatttttgttcttgttgttctcgttgttgttttaagtttactggggaaagtgcatttggccaaatgaaatggtagtcaagcctattgcaacaaagttaggaagtttgttgtttgtttattataaacaaaaagcatgtgaaagtgcacttaagatagagtttttattaattacttacttattacctagattttaaatagacaatccaaagtctccccttcgtgttgccatcatcttgttgaatcagccattttatcgaggcacgtgatcagtgttgcaacataatgaaaaagatggctactgtgccttgtgttacttaatcatacagtaagctgacctggaaatgaatgaaactattactcctaagaattacattgtatagccccacagattaaatttaattaattaattcaaaacatgttaaacgttactttcatgtactatggaaaagtacaagtaggtttacattactgatttccagaagtaagtagtttcccctttcctagtcttctgtgtatgtgatgttgttaatttcttttattgcattataaaataaaaggattatgtatttttaactaaggtgagacattgatatatccttttgctacaagctatagctaatgtgctgagcttgtgccttggtgattgattgattgattgactgattgttttaactgattactgtagatcaacctgatgatttgtttgtttgaaattggcaggaaaaatgcagctttcaaatcattggggggagaaaaaggatgtctttcaggattattttaattaatttttttcataattgagacagaactgtttgttatgtaccataatgctaaataaaactgtggcacttttcaccataatttaatttagtggaaaaagaagacaatgctttccatattgtgataaggtaacatggggtttttctgggccagcctttagaacactgttagggtacatacgctaccttgatgaaagggaccttcgtgcaactgtagtcatcttaaaggcttctcatccactgtgcttcttaatgtgtaattaaagtgaggagaaattaaatactctgagggcgttttatataataaattcgtgaagaaatgtgtgctcttcagttctcaagttttattattatggtatttattaaagttctacaattgtaataacgtatccatatgacaagttttaaagtggtaattgaaataggttatcagatatagagttgttcacatcaagtagacttttaacagagtcagaatgaacctacccttaaaattttagagaaaaaaaatcgtcggttgcacagaatagctgctctagcttgcttaattatgccgggcatgttgtcactcctcttacttttgctgccttttcattactatttaatggaatgtccctgaacaataaggaagagcaaaacatagacattttgactacagtggatacttcctctaccccaaatgttatgttataaaagtactttttttgcccaggtactctattatatattttggttttctttgaattagacctcaatctccaggaagctctggagggaaaaaaaggaaccataaactaaagtaactggttttccaaataaatgtaaacttttttaaccttttattattatagaacatttcaaacatacataaaacatgaaaacagcctgcagccaaacttttctggaccttggcagctccagcaaatgagctggtcatcctaaccctggtttcctgagacaactacttttggggatgcttgcttgtatagggagatgatagatagatagatacatatcaaaaagaaacttgaaaaaggcttcgaacagaacttgccgatgttactcatccctcctcggtacagacattctgttagaacagatggttgtaatggggcagcatcactccctattcccattaaaaacatgaccattctgagatttcaggccccttcgaggaatttttctcaagaattccatacaaactgtcagaggaagaaatgtcgtcccaagactagtccctgtgtagtcttgatccctttacctgcttactgtaattttttttctctgactttccgccagtgtctaagggccatctgtacccctcccacccttccatgagccactgtataatccaaaaacacaccttccatttgctccctcacttgtctccttttacctcaacagtgttagtgtgtaaagaattgcctggggagggtagagggttttacaagtacagagtcccaagtcttttctcccctccccgttagtgggttggcatttattaataggcactgcaagattttgatgcaggtgtggggtagatatcactgtgaaaggctactaatgcatggtagtttcaccgaaagtacagtcttcaaggatccttataatctcctcattgccaaaatcagtaacatctataaccttgacaacaccctagcttgggctgttgcttctctggctacttgtttttccatcccagtttacccagattttagatggatactcctccaattctgcttaaagtccttacctgttcttgcccagttccctctagtcaacctcagtcactcccaaagattcttccccaatcccatatcttttgctcagacctctgtctctgggatttctttgttacctcatagtcagtagtcctaaaaacaaaattcttcatcttgcatctctatcgaccgaccattctttgtttctttttaagaaatgtaaccttcaccccaatcatcaaaatctctcattcctcaattgtcacaggttgtcacttctttccccctaaacctctcccatcattccttccttctttatactgcccttacaggtcctgatcctctgactcacccggacattcttagcagctgcctaatttcactccctgactctcatctccctcttccaatccttttcattgtgctagaacactatcttgctaattttaatatcctctgcattcagtgcctccacagattgccccctcactgacctttccaatttggccttgtgttacacactttcctcgctgcattcctacccagcatcttcacttgtcatatttctcaaatactcttcatgaccagatatttaaagtacctcatccatgaagacttcatcaacccccaaagtgcctccaatgcttccgtggtagcacagcataatggggtacatttcttagttgaacagtgaggagtcactgggattcttacagagtgtcttagggtctcctcttgatactctttccacatttcagttaaggaattttcttacatctttttttcttctaataacctttgcctggagtgtaagtaaattcatgatagagactgtcatttttaaaaaaaaaaacaaaccattttgcctttcacatgttattacctccatctttctgttatcttgtcagtgttgccacctaaatgattgaaaatgaccgagcatgcagtagaatgtagtgaagtttcctatttcatccattttttgcataagtgcattggtatctgtatatccatctgcccaagcaccagttgttgaaaagactattatttccccatgaatggtcctggtacccttgtcaaagaacagttgaccataaatataagactttctggattctcagtcttactccattgccctatatgtctgtcgttataccagcaccgcactgtcttgatggctgtagcttggtagtaagtttagatttgggatgtgcaagtcctccattttttttttttttttccccaaaatcattttgtctgttttgggtcccttgcattgcatatgaatttttatatgatcattgtgtcaattcctgcaaaacagctgggatcttgatagggatttagttgaattggtagataaatttgagaaataactgctattttaatggtgttaggttttctgttccatgactgtgggatgtctttgcatttgcttaggtctttatttcagtgatgttttagagatttcagtgtgcaagtcttgacgtctttaatttttttctaagtattttactgatgccactttaattatatgattattttctaatttttatttttgtattcatcactggtgttagaaataaaattaatttttgtatattgattttgtatattgtagcttttctaaaattctttttttgtcacttagtattttttgcatatgagatcatgcatctgtgaacagaaatacttttacttcttcctttccagtctagattcctattatttcattttcttgccttagtgtgctggctagcacctccagtacaatattggatagaagtgacaagagcagacatctttttcttgttcctgattttaaggggaaagcattcagtctttcaccattgagtatgatgttagctagctgtgggtttgcttcaagttgaggaaattcttttattaaacctagtttactgagtgttttttaatcaaaaaaaaaaaaaggaggggctgtgggttttgttaaatgcttcttctgtatcaagattttcatgttgttttgtcctttattaatatgttgtattaatggacttttgtatattgaattaactttgcattcctgggataatctcagttgtccatgctacataaaccttgttctatgctgctgga

SEQ ID NO: 634 - DNA, 8388 bp, Homo sapiens
  source 1..8388: mol_type = genomic DNA
agtcctcccgtcttgcgccgcggccgcgagatccgtgtgtctcccaagatggtggcgctgggctcggggtgactacaggagacgacggggccttttcccttcgccaggacccgacacaccaggcttcgctcgctcgcgcacccctccgccgcgtagccatccgccagcgcgggcgcccgccatccgccgcctacttacgcttcacctctgccgacccggcgcgctcggctgcgggcggcggcgcctccttcggctcctcctcggaatagctcgcggcctgtagcccctggcaggagggcccctcagccccccggtgtggacaggcagcggcggctggcgacgaacgccgggatttcggcggccccggcgctccctttcccggcctcgttttccggataaggaagcgcgggtcccgcatgagccccggcggtggcggcagcgaaagagaacgaggcggtggcgggcggaggcggcgggcgagggcgactacgaccagtgaggcggccgccgcagcccaggcgcgggggcgacgacagatcaggagaacctcagtctgacgacattgaagctagccgaatgaagcgagcagctgcaaagcatctaatagaacgctactaccaccagttaactgagggctgtggaaatgaagcctgcacgaatgagttttgtgcttcctgtccaacttttcttcgtatggataataatgcagcagctattaaagccctcgagctttataagattaatgcaaaactctgtgatcctcatccctccaagaaaggagcaagctcagcttaccttgagaactcgaaaggtgcccccaacaactcctgctctgagataaaaatgaacaagaaaggcgctagaattgattttaaagatgtgacttacttaacagaagagaaggtatatgaaattcttgaattatgtagagaaagagaggattattcccctttaatccgtgttattggaagagttttttctagtgctgaggcattggtacagagcttccggaaagttaaacaacacaccaaggaagaactgaaatctcttcaagcaaaagatgaagacaaagatgaagatgaaaaggaaaaagctgcatgttctgctgctgctatggaagaagactcagaagcatcttcctcaaggataggtgatagctcacagggagacaacaatttgcaaaaattaggccctgatgatgtgtctgtggatattgatgccattagaagggtctacaccagattgctctctaatgaaaaaattgaaactgcctttctcaatgcacttgtatatttgtcacctaacgtggaatgtgacttgacgtatcacaatgtatactctcgagatcctaattatctgaatttgttcattatcgtaatggagaatagaaatctccacagtcctgaatatctggaaatggctttgccattattttgcaaagcgatgagcaagctaccccttgcagcccaaggaaaactgatcagactgtggtctaaatacaatgcagaccagattcggagaatgatggagacatttcagcaacttattacttataaagtcataagcaatgaatttaacagtcgaaatctagtgaatgatgatgatgccattgttgctgcttcgaagtgcttgaaaatggtttactatgcaaatgtagtgggaggggaagtggacacaaatcacaatgaagaagatgatgaagagcccatccctgagtccagcgagctgacacttcaggaacttttgggagaagaaagaagaaacaagaaaggtcctcgagtggaccccctggaaactgaacttggtgttaaaaccctggattgtcgaaaaccacttatcccttttgaagagtttattaatgaaccactgaatgaggttctagaaatggataaagattatacttttttcaaagtagaaacagagaacaaattctcttttatgacatgtccctttatattgaatgctgtcacaaagaatttgggattatattatgacaatagaattcgcatgtacagtgaacgaagaatcactgttctctacagcttagttcaaggacagcagttgaatccatatttgagactcaaagttagacgtgaccatatcatagatgatgcacttgtccggctagagatgatcgctatggaaaatcctgcagacttgaagaagcagttgtatgtggaatttgaaggagaacaaggagttgatgagggaggtgtttccaaagaattttttcagctggttgtggaggaaatcttcaatccagatattggtatgttcacatacgatgaatctacaaaattgttttggtttaatccatcttcttttgaaactgagggtcagtttactctgattggcatagtactgggtctggctatttacaataactgtatactggatgtacattttcccatggttgtctacaggaagctaatggggaaaaaaggaacttttcgtgacttgggagactctcacccagttctatatcagagtttaaaagatttattggagtatgaagggaatgtggaagatgacatgatgatcactttccagatatcacagacagatctttttggtaacccaatgatgtatgatctaaaggaaaatggtgataaaattccaattacaaatgaaaacaggaagaatctagatttccaagcactagaagaaactacagaatatgacggtggctataccagggactctgttctgattagggagttctgggaaatcgttcattcatttacagatgaacagaaaagactcttcttgcagtttacaacgggcacagacagagcacctgtgggaggactaggaaaattaaagatgattatagccaaaaatggcccagacacagaaaggttacctacatctcatacttgctttaatgtgcttttacttccggaatactcaagcaaagaaaaacttaaagagagattgttgaaggccatcacgtatgccaaaggatttggcatgctgtaaaacaaaacaaaacaaaataaaacaaaaaaaaggaaggaaaaaaaaagaaaaaatttaaaaaattttaaaaatataacgagggataaatttttggtggtgatagtgtcccagtacaaaaaggctgtaagatagtcaaccacagtagtcacctatgtctgtgcctcccttctttattggggacatgtgggctggaacagcagatttcagctacatatatgaacaaatcctttattattattataattatttttttgcgtgaaagtgttacatattctttcacttgtatgtacagagaggtttttctgaatatttattttaagggttaaatcacttttgcttgtgtttattactgcttgaggttgagccttttgagtatttaaaaaatatataccaacagaactactctcccaaggaaaatattgccaccatttgtagaccacgtaaccttcaagtatgtgctacttttttgtccctgtatctaactcaaatcaggaactgtattttttttaatgatttgcttttgaaacttgaagtcttgaaaacagtgtgatgcaattactgctgttctagcccccaaagagttttctgtgcaaaatcttgagaatcaatcaataaagaaagatggaaggaagggagaaattggaatgttttaactgcagccctcagaactttagtaacagcacaacaaattaaaaacaaaaacaactcatgccacagtatgtcgtcttcatgtgtcttgcaatgaactgtttcagtagccaatcctctttcttagtatatgaaaggacagggatttttgttcttgttgttctcgttgttgttttaagtttactggggaaagtgcatttggccaaatgaaatggtagtcaagcctattgcaacaaagttaggaagtttgttgtttgtttattataaacaaaaagcatgtgaaagtgcacttaagatagagtttttattaattacttacttattacctagattttaaatagacaatccaaagtctccccttcgtgttgccatcatcttgttgaatcagccattttatcgaggcacgtgatcagtgttgcaacataatgaaaaagatggctactgtgccttgtgttacttaatcatacagtaagctgacctggaaatgaatgaaactattactcctaagaattacattgtatagccccacagattaaatttaattaattaattcaaaacatgttaaacgttactttcatgtactatggaaaagtacaagtaggtttacattactgatttccagaagtaagtagtttcccctttcctagtcttctgtgtatgtgatgttgttaatttcttttattgcattataaaataaaaggattatgtatttttaactaaggtgagacattgatatatccttttgctacaagctatagctaatgtgctgagcttgtgccttggtgattgattgattgattgactgattgttttaactgattactgtagatcaacctgatgatttgtttgtttgaaattggcaggaaaaatgcagctttcaaatcattggggggagaaaaaggatgtctttcaggattattttaattaatttttttcataattgagacagaactgtttgttatgtaccataatgctaaataaaactgtggcacttttcaccataatttaatttagtggaaaaagaagacaatgctttccatattgtgataaggtaacatggggtttttctgggccagcctttagaacactgttagggtacatacgctaccttgatgaaagggaccttcgtgcaactgtagtcatcttaaaggcttctcatccactgtgcttcttaatgtgtaattaaagtgaggagaaattaaatactctgagggcgttttatataataaattcgtgaagaaatgtgtgctcttcagttctcaagttttattattatggtatttattaaagttctacaattgtaataacgtatccatatgacaagttttaaagtggtaattgaaataggttatcagatatagagttgttcacatcaagtagacttttaacagagtcagaatgaacctacccttaaaattttagagaaaaaaaatcgtcggttgcacagaatagctgctctagcttgcttaattatgccgggcatgttgtcactcctcttacttttgctgccttttcattactatttaatggaatgtccctgaacaataaggaagagcaaaacatagacattttgactacagtggatacttcctctaccccaaatgttatgttataaaagtactttttttgcccaggtactctattatatattttggttttctttgaattagacctcaatctccaggaagctctggagggaaaaaaaggaaccataaactaaagtaactggttttccaaataaatgtaaacttttttaaccttttattattatagaacatttcaaacatacataaaacatgaaaacagcctgcagccaaacttttctggaccttggcagctccagcaaatgagctggtcatcctaaccctggtttcctgagacaactacttttggggatgcttgcttgtatagggagatgatagatagatagatacatatcaaaaagaaacttgaaaaaggcttcgaacagaacttgccgatgttactcatccctcctcggtacagacattctgttagaacagatggttgtaatggggcagcatcactccctattcccattaaaaacatgaccattctgagatttcaggccccttcgaggaatttttctcaagaattccatacaaactgtcagaggaagaaatgtcgtcccaagactagtccctgtgtagtcttgatccctttacctgcttactgtaattttttttctctgactttccgccagtgtctaagggccatctgtacccctcccacccttccatgagccactgtataatccaaaaacacaccttccatttgctccctcacttgtctccttttacctcaacagtgttagtgtgtaaagaattgcctggggagggtagagggttttacaagtacagagtcccaagtcttttctcccctccccgttagtgggttggcatttattaataggcactgcaagattttgatgcaggtgtggggtagatatcactgtgaaaggctactaatgcatggtagtttcaccgaaagtacagtcttcaaggatccttataatctcctcattgccaaaatcagtaacatctataaccttgacaacaccctagcttgggctgttgcttctctggctacttgtttttccatcccagtttacccagattttagatggatactcctccaattctgcttaaagtccttacctgttcttgcccagttccctctagtcaacctcagtcactcccaaagattcttccccaatcccatatcttttgctcagacctctgtctctgggatttctttgttacctcatagtcagtagtcctaaaaacaaaattcttcatcttgcatctctatcgaccgaccattctttgtttctttttaagaaatgtaaccttcaccccaatcatcaaaatctctcattcctcaattgtcacaggttgtcacttctttccccctaaacctctcccatcattccttccttctttatactgcccttacaggtcctgatcctctgactcacccggacattcttagcagctgcctaatttcactccctgactctcatctccctcttccaatccttttcattgtgctagaacactatcttgctaattttaatatcctctgcattcagtgcctccacagattgccccctcactgacctttccaatttggccttgtgttacacactttcctcgctgcattcctacccagcatcttcacttgtcatatttctcaaatactcttcatgaccagatatttaaagtacctcatccatgaagacttcatcaacccccaaagtgcctccaatgcttccgtggtagcacagcataatggggtacatttcttagttgaacagtgaggagtcactgggattcttacagagtgtcttagggtctcctcttgatactctttccacatttcagttaaggaattttcttacatctttttttcttctaataacctttgcctggagtgtaagtaaattcatgatagagactgtcatttttaaaaaaaaaaacaaaccattttgcctttcacatgttattacctccatctttctgttatcttgtcagtgttgccacctaaatgattgaaaatgaccgagcatgcagtagaatgtagtgaagtttcctatttcatccattttttgcataagtgcattggtatctgtatatccatctgcccaagcaccagttgttgaaaagactattatttccccatgaatggtcctggtacccttgtcaaagaacagttgaccataaatataagactttctggattctcagtcttactccattgccctatatgtctgtcgttataccagcaccgcactgtcttgatggctgtagcttggtagtaagtttagatttgggatgtgcaagtcctccattttttttttttttttccccaaaatcattttgtctgttttgggtcccttgcattgcatatgaatttttatatgatcattgtgtcaattcctgcaaaacagctgggatcttgatagggatttagttgaattggtagataaatttgagaaataactgctattttaatggtgttaggttttctgttccatgactgtgggatgtctttgcatttgcttaggtctttatttcagtgatgttttagagatttcagtgtgcaagtcttgacgtctttaatttttttctaagtattttactgatgccactttaattatatgattattttctaatttttatttttgtattcatcactggtgttagaaataaaattaatttttgtatattgattttgtatattgtagcttttctaaaattctttttttgtcacttagtattttttgcatatgagatcatgcatctgtgaacagaaatacttttacttcttcctttccagtctagattcctattatttcattttcttgccttagtgtgctggctagcacctccagtacaatattggatagaagtgacaagagcagacatctttttcttgttcctgattttaaggggaaagcattcagtctttcaccattgagtatgatgttagctagctgtgggtttgcttcaagttgaggaaattcttttattaaacctagtttactgagtgttttttaatcaaaaaaaaaaaaaggaggggctgtgggttttgttaaatgcttcttctgtatcaagattttcatgttgttttgtcctttattaatatgttgtattaatggacttttgtatattgaattaactttgcattcctgggataatctcagttgtccatgctacataaaccttgttctatgctgctgga

SEQ ID NO: 635 - DNA, 8544 bp, Homo sapiens
  source 1..8544: mol_type = genomic DNA
agtcctcccgtcttgcgccgcggccgcgagatccgtgtgtctcccaagatggtggcgctgggctcggggtgactacaggagacgacggggccttttcccttcgccaggacccgacacaccaggcttcgctcgctcgcgcacccctccgccgcgtagccatccgccagcgcgggcgcccgccatccgccgcctacttacgcttcacctctgccgacccggcgcgctcggctgcgggcggcggcgcctccttcggctcctcctcggaatagctcgcggcctgtagcccctggcaggagggcccctcagccccccggtgtggacaggcagcggcggctggcgacgaacgccgggatttcggcggccccggcgctccctttcccggcctcgttttccggataaggaagcgcgggtcccgcatgagccccggcggtggcggcagcgaaagagaacgaggcggtggcgggcggaggcggcgggcgagggcgactacgaccagtgaggcggccgccgcagcccaggcgcgggggcgacgacagatcaggagaacctcagtctgacgacattgaagctagccgaatgaagcgagcagctgcaaagcatctaatagaacgctactaccaccagttaactgagggctgtggaaatgaagcctgcacgaatgagttttgtgcttcctgtccaacttttcttcgtatggataataatgcagcagctattaaagccctcgagctttataagattaatgcaaaactctgtgatcctcatccctccaagaaaggagcaagctcagcttaccttgagaactcgaaaggtgcccccaacaactcctgctctgagataaaaatgaacaagaaaggcgctagaattgattttaaagatgtgacttacttaacagaagagaaggtatatgaaattcttgaattatgtagagaaagagaggattattcccctttaatccgtgttattggaagagttttttctagtgctgaggcattggtacagagcttccggaaagttaaacaacacaccaaggaagaactgaaatctcttcaagcaaaagatgaagacaaagatgaagatgaaaaggaaaaagctgcatgttctgctgctgctatggaagaagactcagaagcatcttcctcaaggataggtgatagctcacagggagacaacaatttgcaaaaattaggccctgatgatgtgtctgtggatattgatgccattagaagggtctacaccagattgctctctaatgaaaaaattgaaactgcctttctcaatgcacttgtatatttgtcacctaacgtggaatgtgacttgacgtatcacaatgtatactctcgagatcctaattatctgaatttgttcattatcgtaatggagaatagaaatctccacagtcctgaatatctggaaatggctttgccattattttgcaaagcgatgagcaagctaccccttgcagcccaaggaaaactgatcagactgtggtctaaatacaatgcagaccagattcggagaatgatggagacatttcagcaacttattacttataaagtcataagcaatgaatttaacagtcgaaatctagtgaatgatgatgatgccattgttgctgcttcgaagtgcttgaaaatggtttactatgcaaatgtagtgggaggggaagtggacacaaatcacaatgaagaagatgatgaagagcccatccctgagtccagcgagctgacacttcaggaacttttgggagaagaaagaagaaacaagaaaggtcctcgagtggaccccctggaaactgaacttggtgttaaaaccctggattgtcgaaaaccacttatcccttttgaagagtttattaatgaaccactgaatgaggttctagaaatggataaagattatacttttttcaaagtagaaacagagaacaaattctcttttatgacatgtccctttatattgaatgctgtcacaaagaatttgggattatattatgacaatagaattcgcatgtacagtgaacgaagaatcactgttctctacagcttagttcaaggacagcagttgaatccatatttgagactcaaagttagacgtgaccatatcatagatgatgcacttgtccggctagagatgatcgctatggaaaatcctgcagacttgaagaagcagttgtatgtggaatttgaaggagaacaaggagttgatgagggaggtgtttccaaagaattttttcagctggttgtggaggaaatcttcaatccagatattggtatgttcacatacgatgaatctacaaaattgttttggtttaatccatcttcttttgaaactgagggtcagtttactctgattggcatagtactgggtctggctatttacaataactgtatactggatgtacattttcccatggttgtctacaggaagctaatggggaaaaaaggaacttttcgtgacttgggagactctcacccagttctatatcagagtttaaaagatttattggagtatgaagggaatgtggaagatgacatgatgatcactttccagatatcacagacagatctttttggtaacccaatgatgtatgatctaaaggaaaatggtgataaaattccaattacaaatgaaaacaggaaggaatttgtcaatctttattctgactacattctcaataaatcagtagaaaaacagttcaaggcttttcggagaggttttcatatggtgaccaatgaatctcccttaaagtacttattcagaccagaagaaattgaattgcttatatgtggaagccggaatctagatttccaagcactagaagaaactacagaatatgacggtggctataccagggactctgttctgattagggagttctgggaaatcgttcattcatttacagatgaacagaaaagactcttcttgcagtttacaacgggcacagacagagcacctgtgggaggactaggaaaattaaagatgattatagccaaaaatggcccagacacagaaaggttacctacatctcatacttgctttaatgtgcttttacttccggaatactcaagcaaagaaaaacttaaagagagattgttgaaggccatcacgtatgccaaaggatttggcatgctgtaaaacaaaacaaaacaaaataaaacaaaaaaaaggaaggaaaaaaaaagaaaaaatttaaaaaattttaaaaatataacgagggataaatttttggtggtgatagtgtcccagtacaaaaaggctgtaagatagtcaaccacagtagtcacctatgtctgtgcctcccttctttattggggacatgtgggctggaacagcagatttcagctacatatatgaacaaatcctttattattattataattatttttttgcgtgaaagtgttacatattctttcacttgtatgtacagagaggtttttctgaatatttattttaagggttaaatcacttttgcttgtgtttattactgcttgaggttgagccttttgagtatttaaaaaatatataccaacagaactactctcccaaggaaaatattgccaccatttgtagaccacgtaaccttcaagtatgtgctacttttttgtccctgtatctaactcaaatcaggaactgtattttttttaatgatttgcttttgaaacttgaagtcttgaaaacagtgtgatgcaattactgctgttctagcccccaaagagttttctgtgcaaaatcttgagaatcaatcaataaagaaagatggaaggaagggagaaattggaatgttttaactgcagccctcagaactttagtaacagcacaacaaattaaaaacaaaaacaactcatgccacagtatgtcgtcttcatgtgtcttgcaatgaactgtttcagtagccaatcctctttcttagtatatgaaaggacagggatttttgttcttgttgttctcgttgttgttttaagtttactggggaaagtgcatttggccaaatgaaatggtagtcaagcctattgcaacaaagttaggaagtttgttgtttgtttattataaacaaaaagcatgtgaaagtgcacttaagatagagtttttattaattacttacttattacctagattttaaatagacaatccaaagtctccccttcgtgttgccatcatcttgttgaatcagccattttatcgaggcacgtgatcagtgttgcaacataatgaaaaagatggctactgtgccttgtgttacttaatcatacagtaagctgacctggaaatgaatgaaactattactcctaagaattacattgtatagccccacagattaaatttaattaattaattcaaaacatgttaaacgttactttcatgtactatggaaaagtacaagtaggtttacattactgatttccagaagtaagtagtttcccctttcctagtcttctgtgtatgtgatgttgttaatttcttttattgcattataaaataaaaggattatgtatttttaactaaggtgagacattgatatatccttttgctacaagctatagctaatgtgctgagcttgtgccttggtgattgattgattgattgactgattgttttaactgattactgtagatcaacctgatgatttgtttgtttgaaattggcaggaaaaatgcagctttcaaatcattggggggagaaaaaggatgtctttcaggattattttaattaatttttttcataattgagacagaactgtttgttatgtaccataatgctaaataaaactgtggcacttttcaccataatttaatttagtggaaaaagaagacaatgctttccatattgtgataaggtaacatggggtttttctgggccagcctttagaacactgttagggtacatacgctaccttgatgaaagggaccttcgtgcaactgtagtcatcttaaaggcttctcatccactgtgcttcttaatgtgtaattaaagtgaggagaaattaaatactctgagggcgttttatataataaattcgtgaagaaatgtgtgctcttcagttctcaagttttattattatggtatttattaaagttctacaattgtaataacgtatccatatgacaagttttaaagtggtaattgaaataggttatcagatatagagttgttcacatcaagtagacttttaacagagtcagaatgaacctacccttaaaattttagagaaaaaaaatcgtcggttgcacagaatagctgctctagcttgcttaattatgccgggcatgttgtcactcctcttacttttgctgccttttcattactatttaatggaatgtccctgaacaataaggaagagcaaaacatagacattttgactacagtggatacttcctctaccccaaatgttatgttataaaagtactttttttgcccaggtactctattatatattttggttttctttgaattagacctcaatctccaggaagctctggagggaaaaaaaggaaccataaactaaagtaactggttttccaaataaatgtaaacttttttaaccttttattattatagaacatttcaaacatacataaaacatgaaaacagcctgcagccaaacttttctggaccttggcagctccagcaaatgagctggtcatcctaaccctggtttcctgagacaactacttttggggatgcttgcttgtatagggagatgatagatagatagatacatatcaaaaagaaacttgaaaaaggcttcgaacagaacttgccgatgttactcatccctcctcggtacagacattctgttagaacagatggttgtaatggggcagcatcactccctattcccattaaaaacatgaccattctgagatttcaggccccttcgaggaatttttctcaagaattccatacaaactgtcagaggaagaaatgtcgtcccaagactagtccctgtgtagtcttgatccctttacctgcttactgtaattttttttctctgactttccgccagtgtctaagggccatctgtacccctcccacccttccatgagccactgtataatccaaaaacacaccttccatttgctccctcacttgtctccttttacctcaacagtgttagtgtgtaaagaattgcctggggagggtagagggttttacaagtacagagtcccaagtcttttctcccctccccgttagtgggttggcatttattaataggcactgcaagattttgatgcaggtgtggggtagatatcactgtgaaaggctactaatgcatggtagtttcaccgaaagtacagtcttcaaggatccttataatctcctcattgccaaaatcagtaacatctataaccttgacaacaccctagcttgggctgttgcttctctggctacttgtttttccatcccagtttacccagattttagatggatactcctccaattctgcttaaagtccttacctgttcttgcccagttccctctagtcaacctcagtcactcccaaagattcttccccaatcccatatcttttgctcagacctctgtctctgggatttctttgttacctcatagtcagtagtcctaaaaacaaaattcttcatcttgcatctctatcgaccgaccattctttgtttctttttaagaaatgtaaccttcaccccaatcatcaaaatctctcattcctcaattgtcacaggttgtcacttctttccccctaaacctctcccatcattccttccttctttatactgcccttacaggtcctgatcctctgactcacccggacattcttagcagctgcctaatttcactccctgactctcatctccctcttccaatccttttcattgtgctagaacactatcttgctaattttaatatcctctgcattcagtgcctccacagattgccccctcactgacctttccaatttggccttgtgttacacactttcctcgctgcattcctacccagcatcttcacttgtcatatttctcaaatactcttcatgaccagatatttaaagtacctcatccatgaagacttcatcaacccccaaagtgcctccaatgcttccgtggtagcacagcataatggggtacatttcttagttgaacagtgaggagtcactgggattcttacagagtgtcttagggtctcctcttgatactctttccacatttcagttaaggaattttcttacatctttttttcttctaataacctttgcctggagtgtaagtaaattcatgatagagactgtcatttttaaaaaaaaaaacaaaccattttgcctttcacatgttattacctccatctttctgttatcttgtcagtgttgccacctaaatgattgaaaatgaccgagcatgcagtagaatgtagtgaagtttcctatttcatccattttttgcataagtgcattggtatctgtatatccatctgcccaagcaccagttgttgaaaagactattatttccccatgaatggtcctggtacccttgtcaaagaacagttgaccataaatataagactttctggattctcagtcttactccattgccctatatgtctgtcgttataccagcaccgcactgtcttgatggctgtagcttggtagtaagtttagatttgggatgtgcaagtcctccattttttttttttttttccccaaaatcattttgtctgttttgggtcccttgcattgcatatgaatttttatatgatcattgtgtcaattcctgcaaaacagctgggatcttgatagggatttagttgaattggtagataaatttgagaaataactgctattttaatggtgttaggttttctgttccatgactgtgggatgtctttgcatttgcttaggtctttatttcagtgatgttttagagatttcagtgtgcaagtcttgacgtctttaatttttttctaagtattttactgatgccactttaattatatgattattttctaatttttatttttgtattcatcactggtgttagaaataaaattaatttttgtatattgattttgtatattgtagcttttctaaaattctttttttgtcacttagtattttttgcatatgagatcatgcatctgtgaacagaaatacttttacttcttcctttccagtctagattcctattatttcattttcttgccttagtgtgctggctagcacctccagtacaatattggatagaagtgacaagagcagacatctttttcttgttcctgattttaaggggaaagcattcagtctttcaccattgagtatgatgttagctagctgtgggtttgcttcaagttgaggaaattcttttattaaacctagtttactgagtgttttttaatcaaaaaaaaaaaaaggaggggctgtgggttttgttaaatgcttcttctgtatcaagattttcatgttgttttgtcctttattaatatgttgtattaatggacttttgtatattgaattaactttgcattcctgggataatctcagttgtccatgctacataaaccttgttctatgctgctgga

SEQ ID NO: 636 - DNA, 8608 bp, Homo sapiens
  source 1..8608: mol_type = genomic DNA
agtcctcccgtcttgcgccgcggccgcgagatccgtgtgtctcccaagatggtggcgctgggctcggggtgactacaggagacgacggggccttttcccttcgccaggacccgacacaccaggcttcgctcgctcgcgcacccctccgccgcgtagccatccgccagcgcgggcgcccgccatccgccgcctacttacgcttcacctctgccgacccggcgcgctcggctgcgggcggcggcgcctccttcggctcctcctcggaatagctcgcggcctgtagcccctggcaggagggcccctcagccccccggtgtggacaggcagcggcggctggcgacgaacgccgggatttcggcggccccggcgctccctttcccggcctcgttttccggataaggaagcgcgggtcccgcatgagccccggcggtggcggcagcgaaagagaacgaggcggtggcgggcggaggcggcgggcgagggcgactacgaccagtgaggcggccgccgcagcccaggcgcgggggcgacgacaggttaaaaatctgtaagagcctgattttagaattcaccagctcctcagaagtttggcgaaatatgatcaggagaacctcagtctgacgacattgaagctagccgaatgaagcgagcagctgcaaagcatctaatagaacgctactaccaccagttaactgagggctgtggaaatgaagcctgcacgaatgagttttgtgcttcctgtccaacttttcttcgtatggataataatgcagcagctattaaagccctcgagctttataagattaatgcaaaactctgtgatcctcatccctccaagaaaggagcaagctcagcttaccttgagaactcgaaaggtgcccccaacaactcctgctctgagataaaaatgaacaagaaaggcgctagaattgattttaaagatgtgacttacttaacagaagagaaggtatatgaaattcttgaattatgtagagaaagagaggattattcccctttaatccgtgttattggaagagttttttctagtgctgaggcattggtacagagcttccggaaagttaaacaacacaccaaggaagaactgaaatctcttcaagcaaaagatgaagacaaagatgaagatgaaaaggaaaaagctgcatgttctgctgctgctatggaagaagactcagaagcatcttcctcaaggataggtgatagctcacagggagacaacaatttgcaaaaattaggccctgatgatgtgtctgtggatattgatgccattagaagggtctacaccagattgctctctaatgaaaaaattgaaactgcctttctcaatgcacttgtatatttgtcacctaacgtggaatgtgacttgacgtatcacaatgtatactctcgagatcctaattatctgaatttgttcattatcgtaatggagaatagaaatctccacagtcctgaatatctggaaatggctttgccattattttgcaaagcgatgagcaagctaccccttgcagcccaaggaaaactgatcagactgtggtctaaatacaatgcagaccagattcggagaatgatggagacatttcagcaacttattacttataaagtcataagcaatgaatttaacagtcgaaatctagtgaatgatgatgatgccattgttgctgcttcgaagtgcttgaaaatggtttactatgcaaatgtagtgggaggggaagtggacacaaatcacaatgaagaagatgatgaagagcccatccctgagtccagcgagctgacacttcaggaacttttgggagaagaaagaagaaacaagaaaggtcctcgagtggaccccctggaaactgaacttggtgttaaaaccctggattgtcgaaaaccacttatcccttttgaagagtttattaatgaaccactgaatgaggttctagaaatggataaagattatacttttttcaaagtagaaacagagaacaaattctcttttatgacatgtccctttatattgaatgctgtcacaaagaatttgggattatattatgacaatagaattcgcatgtacagtgaacgaagaatcactgttctctacagcttagttcaaggacagcagttgaatccatatttgagactcaaagttagacgtgaccatatcatagatgatgcacttgtccggctagagatgatcgctatggaaaatcctgcagacttgaagaagcagttgtatgtggaatttgaaggagaacaaggagttgatgagggaggtgtttccaaagaattttttcagctggttgtggaggaaatcttcaatccagatattggtatgttcacatacgatgaatctacaaaattgttttggtttaatccatcttcttttgaaactgagggtcagtttactctgattggcatagtactgggtctggctatttacaataactgtatactggatgtacattttcccatggttgtctacaggaagctaatggggaaaaaaggaacttttcgtgacttgggagactctcacccagttctatatcagagtttaaaagatttattggagtatgaagggaatgtggaagatgacatgatgatcactttccagatatcacagacagatctttttggtaacccaatgatgtatgatctaaaggaaaatggtgataaaattccaattacaaatgaaaacaggaaggaatttgtcaatctttattctgactacattctcaataaatcagtagaaaaacagttcaaggcttttcggagaggttttcatatggtgaccaatgaatctcccttaaagtacttattcagaccagaagaaattgaattgcttatatgtggaagccggaatctagatttccaagcactagaagaaactacagaatatgacggtggctataccagggactctgttctgattagggagttctgggaaatcgttcattcatttacagatgaacagaaaagactcttcttgcagtttacaacgggcacagacagagcacctgtgggaggactaggaaaattaaagatgattatagccaaaaatggcccagacacagaaaggttacctacatctcatacttgctttaatgtgcttttacttccggaatactcaagcaaagaaaaacttaaagagagattgttgaaggccatcacgtatgccaaaggatttggcatgctgtaaaacaaaacaaaacaaaataaaacaaaaaaaaggaaggaaaaaaaaagaaaaaatttaaaaaattttaaaaatataacgagggataaatttttggtggtgatagtgtcccagtacaaaaaggctgtaagatagtcaaccacagtagtcacctatgtctgtgcctcccttctttattggggacatgtgggctggaacagcagatttcagctacatatatgaacaaatcctttattattattataattatttttttgcgtgaaagtgttacatattctttcacttgtatgtacagagaggtttttctgaatatttattttaagggttaaatcacttttgcttgtgtttattactgcttgaggttgagccttttgagtatttaaaaaatatataccaacagaactactctcccaaggaaaatattgccaccatttgtagaccacgtaaccttcaagtatgtgctacttttttgtccctgtatctaactcaaatcaggaactgtattttttttaatgatttgcttttgaaacttgaagtcttgaaaacagtgtgatgcaattactgctgttctagcccccaaagagttttctgtgcaaaatcttgagaatcaatcaataaagaaagatggaaggaagggagaaattggaatgttttaactgcagccctcagaactttagtaacagcacaacaaattaaaaacaaaaacaactcatgccacagtatgtcgtcttcatgtgtcttgcaatgaactgtttcagtagccaatcctctttcttagtatatgaaaggacagggatttttgttcttgttgttctcgttgttgttttaagtttactggggaaagtgcatttggccaaatgaaatggtagtcaagcctattgcaacaaagttaggaagtttgttgtttgtttattataaacaaaaagcatgtgaaagtgcacttaagatagagtttttattaattacttacttattacctagattttaaatagacaatccaaagtctccccttcgtgttgccatcatcttgttgaatcagccattttatcgaggcacgtgatcagtgttgcaacataatgaaaaagatggctactgtgccttgtgttacttaatcatacagtaagctgacctggaaatgaatgaaactattactcctaagaattacattgtatagccccacagattaaatttaattaattaattcaaaacatgttaaacgttactttcatgtactatggaaaagtacaagtaggtttacattactgatttccagaagtaagtagtttcccctttcctagtcttctgtgtatgtgatgttgttaatttcttttattgcattataaaataaaaggattatgtatttttaactaaggtgagacattgatatatccttttgctacaagctatagctaatgtgctgagcttgtgccttggtgattgattgattgattgactgattgttttaactgattactgtagatcaacctgatgatttgtttgtttgaaattggcaggaaaaatgcagctttcaaatcattggggggagaaaaaggatgtctttcaggattattttaattaatttttttcataattgagacagaactgtttgttatgtaccataatgctaaataaaactgtggcacttttcaccataatttaatttagtggaaaaagaagacaatgctttccatattgtgataaggtaacatggggtttttctgggccagcctttagaacactgttagggtacatacgctaccttgatgaaagggaccttcgtgcaactgtagtcatcttaaaggcttctcatccactgtgcttcttaatgtgtaattaaagtgaggagaaattaaatactctgagggcgttttatataataaattcgtgaagaaatgtgtgctcttcagttctcaagttttattattatggtatttattaaagttctacaattgtaataacgtatccatatgacaagttttaaagtggtaattgaaataggttatcagatatagagttgttcacatcaagtagacttttaacagagtcagaatgaacctacccttaaaattttagagaaaaaaaatcgtcggttgcacagaatagctgctctagcttgcttaattatgccgggcatgttgtcactcctcttacttttgctgccttttcattactatttaatggaatgtccctgaacaataaggaagagcaaaacatagacattttgactacagtggatacttcctctaccccaaatgttatgttataaaagtactttttttgcccaggtactctattatatattttggttttctttgaattagacctcaatctccaggaagctctggagggaaaaaaaggaaccataaactaaagtaactggttttccaaataaatgtaaacttttttaaccttttattattatagaacatttcaaacatacataaaacatgaaaacagcctgcagccaaacttttctggaccttggcagctccagcaaatgagctggtcatcctaaccctggtttcctgagacaactacttttggggatgcttgcttgtatagggagatgatagatagatagatacatatcaaaaagaaacttgaaaaaggcttcgaacagaacttgccgatgttactcatccctcctcggtacagacattctgttagaacagatggttgtaatggggcagcatcactccctattcccattaaaaacatgaccattctgagatttcaggccccttcgaggaatttttctcaagaattccatacaaactgtcagaggaagaaatgtcgtcccaagactagtccctgtgtagtcttgatccctttacctgcttactgtaattttttttctctgactttccgccagtgtctaagggccatctgtacccctcccacccttccatgagccactgtataatccaaaaacacaccttccatttgctccctcacttgtctccttttacctcaacagtgttagtgtgtaaagaattgcctggggagggtagagggttttacaagtacagagtcccaagtcttttctcccctccccgttagtgggttggcatttattaataggcactgcaagattttgatgcaggtgtggggtagatatcactgtgaaaggctactaatgcatggtagtttcaccgaaagtacagtcttcaaggatccttataatctcctcattgccaaaatcagtaacatctataaccttgacaacaccctagcttgggctgttgcttctctggctacttgtttttccatcccagtttacccagattttagatggatactcctccaattctgcttaaagtccttacctgttcttgcccagttccctctagtcaacctcagtcactcccaaagattcttccccaatcccatatcttttgctcagacctctgtctctgggatttctttgttacctcatagtcagtagtcctaaaaacaaaattcttcatcttgcatctctatcgaccgaccattctttgtttctttttaagaaatgtaaccttcaccccaatcatcaaaatctctcattcctcaattgtcacaggttgtcacttctttccccctaaacctctcccatcattccttccttctttatactgcccttacaggtcctgatcctctgactcacccggacattcttagcagctgcctaatttcactccctgactctcatctccctcttccaatccttttcattgtgctagaacactatcttgctaattttaatatcctctgcattcagtgcctccacagattgccccctcactgacctttccaatttggccttgtgttacacactttcctcgctgcattcctacccagcatcttcacttgtcatatttctcaaatactcttcatgaccagatatttaaagtacctcatccatgaagacttcatcaacccccaaagtgcctccaatgcttccgtggtagcacagcataatggggtacatttcttagttgaacagtgaggagtcactgggattcttacagagtgtcttagggtctcctcttgatactctttccacatttcagttaaggaattttcttacatctttttttcttctaataacctttgcctggagtgtaagtaaattcatgatagagactgtcatttttaaaaaaaaaaacaaaccattttgcctttcacatgttattacctccatctttctgttatcttgtcagtgttgccacctaaatgattgaaaatgaccgagcatgcagtagaatgtagtgaagtttcctatttcatccattttttgcataagtgcattggtatctgtatatccatctgcccaagcaccagttgttgaaaagactattatttccccatgaatggtcctggtacccttgtcaaagaacagttgaccataaatataagactttctggattctcagtcttactccattgccctatatgtctgtcgttataccagcaccgcactgtcttgatggctgtagcttggtagtaagtttagatttgggatgtgcaagtcctccattttttttttttttttccccaaaatcattttgtctgttttgggtcccttgcattgcatatgaatttttatatgatcattgtgtcaattcctgcaaaacagctgggatcttgatagggatttagttgaattggtagataaatttgagaaataactgctattttaatggtgttaggttttctgttccatgactgtgggatgtctttgcatttgcttaggtctttatttcagtgatgttttagagatttcagtgtgcaagtcttgacgtctttaatttttttctaagtattttactgatgccactttaattatatgattattttctaatttttatttttgtattcatcactggtgttagaaataaaattaatttttgtatattgattttgtatattgtagcttttctaaaattctttttttgtcacttagtattttttgcatatgagatcatgcatctgtgaacagaaatacttttacttcttcctttccagtctagattcctattatttcattttcttgccttagtgtgctggctagcacctccagtacaatattggatagaagtgacaagagcagacatctttttcttgttcctgattttaaggggaaagcattcagtctttcaccattgagtatgatgttagctagctgtgggtttgcttcaagttgaggaaattcttttattaaacctagtttactgagtgttttttaatcaaaaaaaaaaaaaggaggggctgtgggttttgttaaatgcttcttctgtatcaagattttcatgttgttttgtcctttattaatatgttgtattaatggacttttgtatattgaattaactttgcattcctgggataatctcagttgtccatgctacataaaccttgttctatgctgctgga

SEQ ID NO: 637 - DNA, 7477 bp, Homo sapiens
  source 1..7477: mol_type = genomic DNA
agtcctcccgtcttgcgccgcggccgcgagatccgtgtgtctcccaagatggtggcgctgggctcggggtgactacaggagacgacggggccttttcccttcgccaggacccgacacaccaggcttcgctcgctcgcgcacccctccgccgcgtagccatccgccagcgcgggcgcccgccatccgccgcctacttacgcttcacctctgccgacccggcgcgctcggctgcgggcggcggcgcctccttcggctcctcctcggaatagctcgcggcctgtagcccctggcaggagggcccctcagccccccggtgtggacaggcagcggcggctggcgacgaacgccgggatttcggcggccccggcgctccctttcccggcctcgttttccggataaggaagcgcgggtcccgcatgagccccggcggtggcggcagcgaaagagaacgaggcggtggcgggcggaggcggcgggcgagggcgactacgaccagtgaggcggccgccgcagcccaggcgcgggggcgacgacaggttaaaaatctgtaagagcctgattttagaattcaccagctcctcagaagtttggcgaaatatgagttattaagcctacgctcagatcaaggtagcagctagactggtgtgacaacctgtttttaatcagtgactcaaagctgtgatcaccctgatgtcaccgaatggccacagcttgtaaaagatcaggagaacctcagtctgacgacattgaagctagccgaatgaagcgagcagctgcaaagcatctaatagaacgctactaccaccagttaactgagggctgtggaaatgaagcctgcacgaatgagttttgtgcttcctgtccaacttttcttcgtatggataataatgcagcagctattaaagccctcgagctttataagattaatgcaaaactctgtgatcctcatccctccaagaaaggagcaagctcagcttaccttgagaactcgaaaggtgcccccaacaactcctgctctgagataaaaatgaacaagaaaggcgctagaattgattttaaagagatgatcgctatggaaaatcctgcagacttgaagaagcagttgtatgtggaatttgaaggagaacaaggagttgatgagggaggtgtttccaaagaattttttcagctggttgtggaggaaatcttcaatccagatattggtatgttcacatacgatgaatctacaaaattgttttggtttaatccatcttcttttgaaactgagggtcagtttactctgattggcatagtactgggtctggctatttacaataactgtatactggatgtacattttcccatggttgtctacaggaagctaatggggaaaaaaggaacttttcgtgacttgggagactctcacccagttctatatcagagtttaaaagatttattggagtatgaagggaatgtggaagatgacatgatgatcactttccagatatcacagacagatctttttggtaacccaatgatgtatgatctaaaggaaaatggtgataaaattccaattacaaatgaaaacaggaaggaatttgtcaatctttattctgactacattctcaataaatcagtagaaaaacagttcaaggcttttcggagaggttttcatatggtgaccaatgaatctcccttaaagtacttattcagaccagaagaaattgaattgcttatatgtggaagccggaatctagatttccaagcactagaagaaactacagaatatgacggtggctataccagggactctgttctgattagggagttctgggaaatcgttcattcatttacagatgaacagaaaagactcttcttgcagtttacaacgggcacagacagagcacctgtgggaggactaggaaaattaaagatgattatagccaaaaatggcccagacacagaaaggttacctacatctcatacttgctttaatgtgcttttacttccggaatactcaagcaaagaaaaacttaaagagagattgttgaaggccatcacgtatgccaaaggatttggcatgctgtaaaacaaaacaaaacaaaataaaacaaaaaaaaggaaggaaaaaaaaagaaaaaatttaaaaaattttaaaaatataacgagggataaatttttggtggtgatagtgtcccagtacaaaaaggctgtaagatagtcaaccacagtagtcacctatgtctgtgcctcccttctttattggggacatgtgggctggaacagcagatttcagctacatatatgaacaaatcctttattattattataattatttttttgcgtgaaagtgttacatattctttcacttgtatgtacagagaggtttttctgaatatttattttaagggttaaatcacttttgcttgtgtttattactgcttgaggttgagccttttgagtatttaaaaaatatataccaacagaactactctcccaaggaaaatattgccaccatttgtagaccacgtaaccttcaagtatgtgctacttttttgtccctgtatctaactcaaatcaggaactgtattttttttaatgatttgcttttgaaacttgaagtcttgaaaacagtgtgatgcaattactgctgttctagcccccaaagagttttctgtgcaaaatcttgagaatcaatcaataaagaaagatggaaggaagggagaaattggaatgttttaactgcagccctcagaactttagtaacagcacaacaaattaaaaacaaaaacaactcatgccacagtatgtcgtcttcatgtgtcttgcaatgaactgtttcagtagccaatcctctttcttagtatatgaaaggacagggatttttgttcttgttgttctcgttgttgttttaagtttactggggaaagtgcatttggccaaatgaaatggtagtcaagcctattgcaacaaagttaggaagtttgttgtttgtttattataaacaaaaagcatgtgaaagtgcacttaagatagagtttttattaattacttacttattacctagattttaaatagacaatccaaagtctccccttcgtgttgccatcatcttgttgaatcagccattttatcgaggcacgtgatcagtgttgcaacataatgaaaaagatggctactgtgccttgtgttacttaatcatacagtaagctgacctggaaatgaatgaaactattactcctaagaattacattgtatagccccacagattaaatttaattaattaattcaaaacatgttaaacgttactttcatgtactatggaaaagtacaagtaggtttacattactgatttccagaagtaagtagtttcccctttcctagtcttctgtgtatgtgatgttgttaatttcttttattgcattataaaataaaaggattatgtatttttaactaaggtgagacattgatatatccttttgctacaagctatagctaatgtgctgagcttgtgccttggtgattgattgattgattgactgattgttttaactgattactgtagatcaacctgatgatttgtttgtttgaaattggcaggaaaaatgcagctttcaaatcattggggggagaaaaaggatgtctttcaggattattttaattaatttttttcataattgagacagaactgtttgttatgtaccataatgctaaataaaactgtggcacttttcaccataatttaatttagtggaaaaagaagacaatgctttccatattgtgataaggtaacatggggtttttctgggccagcctttagaacactgttagggtacatacgctaccttgatgaaagggaccttcgtgcaactgtagtcatcttaaaggcttctcatccactgtgcttcttaatgtgtaattaaagtgaggagaaattaaatactctgagggcgttttatataataaattcgtgaagaaatgtgtgctcttcagttctcaagttttattattatggtatttattaaagttctacaattgtaataacgtatccatatgacaagttttaaagtggtaattgaaataggttatcagatatagagttgttcacatcaagtagacttttaacagagtcagaatgaacctacccttaaaattttagagaaaaaaaatcgtcggttgcacagaatagctgctctagcttgcttaattatgccgggcatgttgtcactcctcttacttttgctgccttttcattactatttaatggaatgtccctgaacaataaggaagagcaaaacatagacattttgactacagtggatacttcctctaccccaaatgttatgttataaaagtactttttttgcccaggtactctattatatattttggttttctttgaattagacctcaatctccaggaagctctggagggaaaaaaaggaaccataaactaaagtaactggttttccaaataaatgtaaacttttttaaccttttattattatagaacatttcaaacatacataaaacatgaaaacagcctgcagccaaacttttctggaccttggcagctccagcaaatgagctggtcatcctaaccctggtttcctgagacaactacttttggggatgcttgcttgtatagggagatgatagatagatagatacatatcaaaaagaaacttgaaaaaggcttcgaacagaacttgccgatgttactcatccctcctcggtacagacattctgttagaacagatggttgtaatggggcagcatcactccctattcccattaaaaacatgaccattctgagatttcaggccccttcgaggaatttttctcaagaattccatacaaactgtcagaggaagaaatgtcgtcccaagactagtccctgtgtagtcttgatccctttacctgcttactgtaattttttttctctgactttccgccagtgtctaagggccatctgtacccctcccacccttccatgagccactgtataatccaaaaacacaccttccatttgctccctcacttgtctccttttacctcaacagtgttagtgtgtaaagaattgcctggggagggtagagggttttacaagtacagagtcccaagtcttttctcccctccccgttagtgggttggcatttattaataggcactgcaagattttgatgcaggtgtggggtagatatcactgtgaaaggctactaatgcatggtagtttcaccgaaagtacagtcttcaaggatccttataatctcctcattgccaaaatcagtaacatctataaccttgacaacaccctagcttgggctgttgcttctctggctacttgtttttccatcccagtttacccagattttagatggatactcctccaattctgcttaaagtccttacctgttcttgcccagttccctctagtcaacctcagtcactcccaaagattcttccccaatcccatatcttttgctcagacctctgtctctgggatttctttgttacctcatagtcagtagtcctaaaaacaaaattcttcatcttgcatctctatcgaccgaccattctttgtttctttttaagaaatgtaaccttcaccccaatcatcaaaatctctcattcctcaattgtcacaggttgtcacttctttccccctaaacctctcccatcattccttccttctttatactgcccttacaggtcctgatcctctgactcacccggacattcttagcagctgcctaatttcactccctgactctcatctccctcttccaatccttttcattgtgctagaacactatcttgctaattttaatatcctctgcattcagtgcctccacagattgccccctcactgacctttccaatttggccttgtgttacacactttcctcgctgcattcctacccagcatcttcacttgtcatatttctcaaatactcttcatgaccagatatttaaagtacctcatccatgaagacttcatcaacccccaaagtgcctccaatgcttccgtggtagcacagcataatggggtacatttcttagttgaacagtgaggagtcactgggattcttacagagtgtcttagggtctcctcttgatactctttccacatttcagttaaggaattttcttacatctttttttcttctaataacctttgcctggagtgtaagtaaattcatgatagagactgtcatttttaaaaaaaaaaacaaaccattttgcctttcacatgttattacctccatctttctgttatcttgtcagtgttgccacctaaatgattgaaaatgaccgagcatgcagtagaatgtagtgaagtttcctatttcatccattttttgcataagtgcattggtatctgtatatccatctgcccaagcaccagttgttgaaaagactattatttccccatgaatggtcctggtacccttgtcaaagaacagttgaccataaatataagactttctggattctcagtcttactccattgccctatatgtctgtcgttataccagcaccgcactgtcttgatggctgtagcttggtagtaagtttagatttgggatgtgcaagtcctccattttttttttttttttccccaaaatcattttgtctgttttgggtcccttgcattgcatatgaatttttatatgatcattgtgtcaattcctgcaaaacagctgggatcttgatagggatttagttgaattggtagataaatttgagaaataactgctattttaatggtgttaggttttctgttccatgactgtgggatgtctttgcatttgcttaggtctttatttcagtgatgttttagagatttcagtgtgcaagtcttgacgtctttaatttttttctaagtattttactgatgccactttaattatatgattattttctaatttttatttttgtattcatcactggtgttagaaataaaattaatttttgtatattgattttgtatattgtagcttttctaaaattctttttttgtcacttagtattttttgcatatgagatcatgcatctgtgaacagaaatacttttacttcttcctttccagtctagattcctattatttcattttcttgccttagtgtgctggctagcacctccagtacaatattggatagaagtgacaagagcagacatctttttcttgttcctgattttaaggggaaagcattcagtctttcaccattgagtatgatgttagctagctgtgggtttgcttcaagttgaggaaattcttttattaaacctagtttactgagtgttttttaatcaaaaaaaaaaaaaggaggggctgtgggttttgttaaatgcttcttctgtatcaagattttcatgttgttttgtcctttattaatatgttgtattaatggacttttgtatattgaattaactttgcattcctgggataatctcagttgtccatgctacataaaccttgttctatgctgctgga

SEQ ID NO: 638 - DNA, 8572 bp, Homo sapiens
  source 1..8572: mol_type = genomic DNA
agtcctcccgtcttgcgccgcggccgcgagatccgtgtgtctcccaagatggtggcgctgggctcggggtgactacaggagacgacggggccttttcccttcgccaggacccgacacaccaggcttcgctcgctcgcgcacccctccgccgcgtagccatccgccagcgcgggcgcccgccatccgccgcctacttacgcttcacctctgccgacccggcgcgctcggctgcgggcggcggcgcctccttcggctcctcctcggaatagctcgcggcctgtagcccctggcaggagggcccctcagccccccggtgtggacaggcagcggcggctggcgacgaacgccgggatttcggcggccccggcgctccctttcccggcctcgttttccggataaggaagcgcgggtcccgcatgagccccggcggtggcggcagcgaaagagaacgaggcggtggcgggcggaggcggcgggcgagggcgactacgaccagtgaggcggccgccgcagcccaggcgcgggggcgacgacaggttaaaaatctgtaagagcctgattttagaattcaccagctcctcagaagtttggcgaaatatgagttattaagcctacgctcagatcaaggtagcagctagactggtgtgacaacctgtttttaatcagtgactcaaagctgtgatcaccctgatgtcaccgaatggccacagcttgtaaaagatcaggagaacctcagtctgacgacattgaagctagccgaatgaagcgagcagctgcaaagcatctaatagaacgctactaccaccagttaactgagggctgtggaaatgaagcctgcacgaatgagttttgtgcttcctgtccaacttttcttcgtatggataataatgcagcagctattaaagccctcgagctttataagattaatgcaaaactctgtgatcctcatccctccaagaaaggagcaagctcagcttaccttgagaactcgaaaggtgcccccaacaactcctgctctgagataaaaatgaacaagaaaggcgctagaattgattttaaagatgtgacttacttaacagaagagaaggtatatgaaattcttgaattatgtagagaaagagaggattattcccctttaatccgtgttattggaagagttttttctagtgctgaggcattggtacagagcttccggaaagttaaacaacacaccaaggaagaactgaaatctcttcaagcaaaagatgaagacaaagatgaagatgaaaaggaaaaagctgcatgttctgctgctgctatggaagaagactcagaagcatcttcctcaaggataggtgatagctcacagggagacaacaatttgcaaaaattaggccctgatgatgtgtctgtggatattgatgccattagaagggtctacaccagattgctctctaatgaaaaaattgaaactgcctttctcaatgcacttgtatatttgtcacctaacgtggaatgtgacttgacgtatcacaatgtatactctcgagatcctaattatctgaatttgttcattatcgtaatggagaatagaaatctccacagtcctgaatatctggaaatggctttgccattattttgcaaagcgatgagcaagctaccccttgcagcccaaggaaaactgatcagactgtggtctaaatacaatgcagaccagattcggagaatgatggagacatttcagcaacttattacttataaagtcataagcaatgaatttaacagtcgaaatctagtgaatgatgatgatgccattgttgctgcttcgaagtgcttgaaaatggtttactatgcaaatgtagtgggaggggaagtggacacaaatcacaatgaagaagatgatgaagagcccatccctgagtccagcgagctgacacttcaggaacttttgggagaagaaagaagaaacaagaaaggtcctcgagtggaccccctggaaactgaacttggtgttaaaaccctggattgtcgaaaaccacttatcccttttgaagagtttattaatgaaccactgaatgaggttctagaaatggataaagattatacttttttcaaagtagaaacagagaacaaattctcttttatgacatgtccctttatattgaatgctgtcacaaagaatttgggattatattatgacaatagaattcgcatgtacagtgaacgaagaatcactgttctctacagcttagttcaaggacagcagttgaatccatatttgagactcaaagttagacgtgaccatatcatagatgatgcacttgtccggctagagatgatcgctatggaaaatcctgcagacttgaagaagcagttgtatgtggaatttgaaggagaacaaggagttgatgagggaggtgtttccaaagaattttttcagctggttgtggaggaaatcttcaatccagatattggtatgttcacatacgatgaatctacaaaattgttttggtttaatccatcttcttttgaaactgagggtcagtttactctgattggcatagtactgggtctggctatttacaataactgtatactggatgtacattttcccatggttgtctacaggaagctaatggggaaaaaaggaacttttcgtgacttgggagactctcacccagttctatatcagagtttaaaagatttattggagtatgaagggaatgtggaagatgacatgatgatcactttccagatatcacagacagatctttttggtaacccaatgatgtatgatctaaaggaaaatggtgataaaattccaattacaaatgaaaacaggaagaatctagatttccaagcactagaagaaactacagaatatgacggtggctataccagggactctgttctgattagggagttctgggaaatcgttcattcatttacagatgaacagaaaagactcttcttgcagtttacaacgggcacagacagagcacctgtgggaggactaggaaaattaaagatgattatagccaaaaatggcccagacacagaaaggttacctacatctcatacttgctttaatgtgcttttacttccggaatactcaagcaaagaaaaacttaaagagagattgttgaaggccatcacgtatgccaaaggatttggcatgctgtaaaacaaaacaaaacaaaataaaacaaaaaaaaggaaggaaaaaaaaagaaaaaatttaaaaaattttaaaaatataacgagggataaatttttggtggtgatagtgtcccagtacaaaaaggctgtaagatagtcaaccacagtagtcacctatgtctgtgcctcccttctttattggggacatgtgggctggaacagcagatttcagctacatatatgaacaaatcctttattattattataattatttttttgcgtgaaagtgttacatattctttcacttgtatgtacagagaggtttttctgaatatttattttaagggttaaatcacttttgcttgtgtttattactgcttgaggttgagccttttgagtatttaaaaaatatataccaacagaactactctcccaaggaaaatattgccaccatttgtagaccacgtaaccttcaagtatgtgctacttttttgtccctgtatctaactcaaatcaggaactgtattttttttaatgatttgcttttgaaacttgaagtcttgaaaacagtgtgatgcaattactgctgttctagcccccaaagagttttctgtgcaaaatcttgagaatcaatcaataaagaaagatggaaggaagggagaaattggaatgttttaactgcagccctcagaactttagtaacagcacaacaaattaaaaacaaaaacaactcatgccacagtatgtcgtcttcatgtgtcttgcaatgaactgtttcagtagccaatcctctttcttagtatatgaaaggacagggatttttgttcttgttgttctcgttgttgttttaagtttactggggaaagtgcatttggccaaatgaaatggtagtcaagcctattgcaacaaagttaggaagtttgttgtttgtttattataaacaaaaagcatgtgaaagtgcacttaagatagagtttttattaattacttacttattacctagattttaaatagacaatccaaagtctccccttcgtgttgccatcatcttgttgaatcagccattttatcgaggcacgtgatcagtgttgcaacataatgaaaaagatggctactgtgccttgtgttacttaatcatacagtaagctgacctggaaatgaatgaaactattactcctaagaattacattgtatagccccacagattaaatttaattaattaattcaaaacatgttaaacgttactttcatgtactatggaaaagtacaagtaggtttacattactgatttccagaagtaagtagtttcccctttcctagtcttctgtgtatgtgatgttgttaatttcttttattgcattataaaataaaaggattatgtatttttaactaaggtgagacattgatatatccttttgctacaagctatagctaatgtgctgagcttgtgccttggtgattgattgattgattgactgattgttttaactgattactgtagatcaacctgatgatttgtttgtttgaaattggcaggaaaaatgcagctttcaaatcattggggggagaaaaaggatgtctttcaggattattttaattaatttttttcataattgagacagaactgtttgttatgtaccataatgctaaataaaactgtggcacttttcaccataatttaatttagtggaaaaagaagacaatgctttccatattgtgataaggtaacatggggtttttctgggccagcctttagaacactgttagggtacatacgctaccttgatgaaagggaccttcgtgcaactgtagtcatcttaaaggcttctcatccactgtgcttcttaatgtgtaattaaagtgaggagaaattaaatactctgagggcgttttatataataaattcgtgaagaaatgtgtgctcttcagttctcaagttttattattatggtatttattaaagttctacaattgtaataacgtatccatatgacaagttttaaagtggtaattgaaataggttatcagatatagagttgttcacatcaagtagacttttaacagagtcagaatgaacctacccttaaaattttagagaaaaaaaatcgtcggttgcacagaatagctgctctagcttgcttaattatgccgggcatgttgtcactcctcttacttttgctgccttttcattactatttaatggaatgtccctgaacaataaggaagagcaaaacatagacattttgactacagtggatacttcctctaccccaaatgttatgttataaaagtactttttttgcccaggtactctattatatattttggttttctttgaattagacctcaatctccaggaagctctggagggaaaaaaaggaaccataaactaaagtaactggttttccaaataaatgtaaacttttttaaccttttattattatagaacatttcaaacatacataaaacatgaaaacagcctgcagccaaacttttctggaccttggcagctccagcaaatgagctggtcatcctaaccctggtttcctgagacaactacttttggggatgcttgcttgtatagggagatgatagatagatagatacatatcaaaaagaaacttgaaaaaggcttcgaacagaacttgccgatgttactcatccctcctcggtacagacattctgttagaacagatggttgtaatggggcagcatcactccctattcccattaaaaacatgaccattctgagatttcaggccccttcgaggaatttttctcaagaattccatacaaactgtcagaggaagaaatgtcgtcccaagactagtccctgtgtagtcttgatccctttacctgcttactgtaattttttttctctgactttccgccagtgtctaagggccatctgtacccctcccacccttccatgagccactgtataatccaaaaacacaccttccatttgctccctcacttgtctccttttacctcaacagtgttagtgtgtaaagaattgcctggggagggtagagggttttacaagtacagagtcccaagtcttttctcccctccccgttagtgggttggcatttattaataggcactgcaagattttgatgcaggtgtggggtagatatcactgtgaaaggctactaatgcatggtagtttcaccgaaagtacagtcttcaaggatccttataatctcctcattgccaaaatcagtaacatctataaccttgacaacaccctagcttgggctgttgcttctctggctacttgtttttccatcccagtttacccagattttagatggatactcctccaattctgcttaaagtccttacctgttcttgcccagttccctctagtcaacctcagtcactcccaaagattcttccccaatcccatatcttttgctcagacctctgtctctgggatttctttgttacctcatagtcagtagtcctaaaaacaaaattcttcatcttgcatctctatcgaccgaccattctttgtttctttttaagaaatgtaaccttcaccccaatcatcaaaatctctcattcctcaattgtcacaggttgtcacttctttccccctaaacctctcccatcattccttccttctttatactgcccttacaggtcctgatcctctgactcacccggacattcttagcagctgcctaatttcactccctgactctcatctccctcttccaatccttttcattgtgctagaacactatcttgctaattttaatatcctctgcattcagtgcctccacagattgccccctcactgacctttccaatttggccttgtgttacacactttcctcgctgcattcctacccagcatcttcacttgtcatatttctcaaatactcttcatgaccagatatttaaagtacctcatccatgaagacttcatcaacccccaaagtgcctccaatgcttccgtggtagcacagcataatggggtacatttcttagttgaacagtgaggagtcactgggattcttacagagtgtcttagggtctcctcttgatactctttccacatttcagttaaggaattttcttacatctttttttcttctaataacctttgcctggagtgtaagtaaattcatgatagagactgtcatttttaaaaaaaaaaacaaaccattttgcctttcacatgttattacctccatctttctgttatcttgtcagtgttgccacctaaatgattgaaaatgaccgagcatgcagtagaatgtagtgaagtttcctatttcatccattttttgcataagtgcattggtatctgtatatccatctgcccaagcaccagttgttgaaaagactattatttccccatgaatggtcctggtacccttgtcaaagaacagttgaccataaatataagactttctggattctcagtcttactccattgccctatatgtctgtcgttataccagcaccgcactgtcttgatggctgtagcttggtagtaagtttagatttgggatgtgcaagtcctccattttttttttttttttccccaaaatcattttgtctgttttgggtcccttgcattgcatatgaatttttatatgatcattgtgtcaattcctgcaaaacagctgggatcttgatagggatttagttgaattggtagataaatttgagaaataactgctattttaatggtgttaggttttctgttccatgactgtgggatgtctttgcatttgcttaggtctttatttcagtgatgttttagagatttcagtgtgcaagtcttgacgtctttaatttttttctaagtattttactgatgccactttaattatatgattattttctaatttttatttttgtattcatcactggtgttagaaataaaattaatttttgtatattgattttgtatattgtagcttttctaaaattctttttttgtcacttagtattttttgcatatgagatcatgcatctgtgaacagaaatacttttacttcttcctttccagtctagattcctattatttcattttcttgccttagtgtgctggctagcacctccagtacaatattggatagaagtgacaagagcagacatctttttcttgttcctgattttaaggggaaagcattcagtctttcaccattgagtatgatgttagctagctgtgggtttgcttcaagttgaggaaattcttttattaaacctagtttactgagtgttttttaatcaaaaaaaaaaaaaggaggggctgtgggttttgttaaatgcttcttctgtatcaagattttcatgttgttttgtcctttattaatatgttgtattaatggacttttgtatattgaattaactttgcattcctgggataatctcagttgtccatgctacataaaccttgttctatgctgctgga

SEQ ID NO: 639 - DNA, 8728 bp, Homo sapiens
  source 1..8728: mol_type = genomic DNA
agtcctcccgtcttgcgccgcggccgcgagatccgtgtgtctcccaagatggtggcgctgggctcggggtgactacaggagacgacggggccttttcccttcgccaggacccgacacaccaggcttcgctcgctcgcgcacccctccgccgcgtagccatccgccagcgcgggcgcccgccatccgccgcctacttacgcttcacctctgccgacccggcgcgctcggctgcgggcggcggcgcctccttcggctcctcctcggaatagctcgcggcctgtagcccctggcaggagggcccctcagccccccggtgtggacaggcagcggcggctggcgacgaacgccgggatttcggcggccccggcgctccctttcccggcctcgttttccggataaggaagcgcgggtcccgcatgagccccggcggtggcggcagcgaaagagaacgaggcggtggcgggcggaggcggcgggcgagggcgactacgaccagtgaggcggccgccgcagcccaggcgcgggggcgacgacaggttaaaaatctgtaagagcctgattttagaattcaccagctcctcagaagtttggcgaaatatgagttattaagcctacgctcagatcaaggtagcagctagactggtgtgacaacctgtttttaatcagtgactcaaagctgtgatcaccctgatgtcaccgaatggccacagcttgtaaaagatcaggagaacctcagtctgacgacattgaagctagccgaatgaagcgagcagctgcaaagcatctaatagaacgctactaccaccagttaactgagggctgtggaaatgaagcctgcacgaatgagttttgtgcttcctgtccaacttttcttcgtatggataataatgcagcagctattaaagccctcgagctttataagattaatgcaaaactctgtgatcctcatccctccaagaaaggagcaagctcagcttaccttgagaactcgaaaggtgcccccaacaactcctgctctgagataaaaatgaacaagaaaggcgctagaattgattttaaagatgtgacttacttaacagaagagaaggtatatgaaattcttgaattatgtagagaaagagaggattattcccctttaatccgtgttattggaagagttttttctagtgctgaggcattggtacagagcttccggaaagttaaacaacacaccaaggaagaactgaaatctcttcaagcaaaagatgaagacaaagatgaagatgaaaaggaaaaagctgcatgttctgctgctgctatggaagaagactcagaagcatcttcctcaaggataggtgatagctcacagggagacaacaatttgcaaaaattaggccctgatgatgtgtctgtggatattgatgccattagaagggtctacaccagattgctctctaatgaaaaaattgaaactgcctttctcaatgcacttgtatatttgtcacctaacgtggaatgtgacttgacgtatcacaatgtatactctcgagatcctaattatctgaatttgttcattatcgtaatggagaatagaaatctccacagtcctgaatatctggaaatggctttgccattattttgcaaagcgatgagcaagctaccccttgcagcccaaggaaaactgatcagactgtggtctaaatacaatgcagaccagattcggagaatgatggagacatttcagcaacttattacttataaagtcataagcaatgaatttaacagtcgaaatctagtgaatgatgatgatgccattgttgctgcttcgaagtgcttgaaaatggtttactatgcaaatgtagtgggaggggaagtggacacaaatcacaatgaagaagatgatgaagagcccatccctgagtccagcgagctgacacttcaggaacttttgggagaagaaagaagaaacaagaaaggtcctcgagtggaccccctggaaactgaacttggtgttaaaaccctggattgtcgaaaaccacttatcccttttgaagagtttattaatgaaccactgaatgaggttctagaaatggataaagattatacttttttcaaagtagaaacagagaacaaattctcttttatgacatgtccctttatattgaatgctgtcacaaagaatttgggattatattatgacaatagaattcgcatgtacagtgaacgaagaatcactgttctctacagcttagttcaaggacagcagttgaatccatatttgagactcaaagttagacgtgaccatatcatagatgatgcacttgtccggctagagatgatcgctatggaaaatcctgcagacttgaagaagcagttgtatgtggaatttgaaggagaacaaggagttgatgagggaggtgtttccaaagaattttttcagctggttgtggaggaaatcttcaatccagatattggtatgttcacatacgatgaatctacaaaattgttttggtttaatccatcttcttttgaaactgagggtcagtttactctgattggcatagtactgggtctggctatttacaataactgtatactggatgtacattttcccatggttgtctacaggaagctaatggggaaaaaaggaacttttcgtgacttgggagactctcacccagttctatatcagagtttaaaagatttattggagtatgaagggaatgtggaagatgacatgatgatcactttccagatatcacagacagatctttttggtaacccaatgatgtatgatctaaaggaaaatggtgataaaattccaattacaaatgaaaacaggaaggaatttgtcaatctttattctgactacattctcaataaatcagtagaaaaacagttcaaggcttttcggagaggttttcatatggtgaccaatgaatctcccttaaagtacttattcagaccagaagaaattgaattgcttatatgtggaagccggaatctagatttccaagcactagaagaaactacagaatatgacggtggctataccagggactctgttctgattagggagttctgggaaatcgttcattcatttacagatgaacagaaaagactcttcttgcagtttacaacgggcacagacagagcacctgtgggaggactaggaaaattaaagatgattatagccaaaaatggcccagacacagaaaggttacctacatctcatacttgctttaatgtgcttttacttccggaatactcaagcaaagaaaaacttaaagagagattgttgaaggccatcacgtatgccaaaggatttggcatgctgtaaaacaaaacaaaacaaaataaaacaaaaaaaaggaaggaaaaaaaaagaaaaaatttaaaaaattttaaaaatataacgagggataaatttttggtggtgatagtgtcccagtacaaaaaggctgtaagatagtcaaccacagtagtcacctatgtctgtgcctcccttctttattggggacatgtgggctggaacagcagatttcagctacatatatgaacaaatcctttattattattataattatttttttgcgtgaaagtgttacatattctttcacttgtatgtacagagaggtttttctgaatatttattttaagggttaaatcacttttgcttgtgtttattactgcttgaggttgagccttttgagtatttaaaaaatatataccaacagaactactctcccaaggaaaatattgccaccatttgtagaccacgtaaccttcaagtatgtgctacttttttgtccctgtatctaactcaaatcaggaactgtattttttttaatgatttgcttttgaaacttgaagtcttgaaaacagtgtgatgcaattactgctgttctagcccccaaagagttttctgtgcaaaatcttgagaatcaatcaataaagaaagatggaaggaagggagaaattggaatgttttaactgcagccctcagaactttagtaacagcacaacaaattaaaaacaaaaacaactcatgccacagtatgtcgtcttcatgtgtcttgcaatgaactgtttcagtagccaatcctctttcttagtatatgaaaggacagggatttttgttcttgttgttctcgttgttgttttaagtttactggggaaagtgcatttggccaaatgaaatggtagtcaagcctattgcaacaaagttaggaagtttgttgtttgtttattataaacaaaaagcatgtgaaagtgcacttaagatagagtttttattaattacttacttattacctagattttaaatagacaatccaaagtctccccttcgtgttgccatcatcttgttgaatcagccattttatcgaggcacgtgatcagtgttgcaacataatgaaaaagatggctactgtgccttgtgttacttaatcatacagtaagctgacctggaaatgaatgaaactattactcctaagaattacattgtatagccccacagattaaatttaattaattaattcaaaacatgttaaacgttactttcatgtactatggaaaagtacaagtaggtttacattactgatttccagaagtaagtagtttcccctttcctagtcttctgtgtatgtgatgttgttaatttcttttattgcattataaaataaaaggattatgtatttttaactaaggtgagacattgatatatccttttgctacaagctatagctaatgtgctgagcttgtgccttggtgattgattgattgattgactgattgttttaactgattactgtagatcaacctgatgatttgtttgtttgaaattggcaggaaaaatgcagctttcaaatcattggggggagaaaaaggatgtctttcaggattattttaattaatttttttcataattgagacagaactgtttgttatgtaccataatgctaaataaaactgtggcacttttcaccataatttaatttagtggaaaaagaagacaatgctttccatattgtgataaggtaacatggggtttttctgggccagcctttagaacactgttagggtacatacgctaccttgatgaaagggaccttcgtgcaactgtagtcatcttaaaggcttctcatccactgtgcttcttaatgtgtaattaaagtgaggagaaattaaatactctgagggcgttttatataataaattcgtgaagaaatgtgtgctcttcagttctcaagttttattattatggtatttattaaagttctacaattgtaataacgtatccatatgacaagttttaaagtggtaattgaaataggttatcagatatagagttgttcacatcaagtagacttttaacagagtcagaatgaacctacccttaaaattttagagaaaaaaaatcgtcggttgcacagaatagctgctctagcttgcttaattatgccgggcatgttgtcactcctcttacttttgctgccttttcattactatttaatggaatgtccctgaacaataaggaagagcaaaacatagacattttgactacagtggatacttcctctaccccaaatgttatgttataaaagtactttttttgcccaggtactctattatatattttggttttctttgaattagacctcaatctccaggaagctctggagggaaaaaaaggaaccataaactaaagtaactggttttccaaataaatgtaaacttttttaaccttttattattatagaacatttcaaacatacataaaacatgaaaacagcctgcagccaaacttttctggaccttggcagctccagcaaatgagctggtcatcctaaccctggtttcctgagacaactacttttggggatgcttgcttgtatagggagatgatagatagatagatacatatcaaaaagaaacttgaaaaaggcttcgaacagaacttgccgatgttactcatccctcctcggtacagacattctgttagaacagatggttgtaatggggcagcatcactccctattcccattaaaaacatgaccattctgagatttcaggccccttcgaggaatttttctcaagaattccatacaaactgtcagaggaagaaatgtcgtcccaagactagtccctgtgtagtcttgatccctttacctgcttactgtaattttttttctctgactttccgccagtgtctaagggccatctgtacccctcccacccttccatgagccactgtataatccaaaaacacaccttccatttgctccctcacttgtctccttttacctcaacagtgttagtgtgtaaagaattgcctggggagggtagagggttttacaagtacagagtcccaagtcttttctcccctccccgttagtgggttggcatttattaataggcactgcaagattttgatgcaggtgtggggtagatatcactgtgaaaggctactaatgcatggtagtttcaccgaaagtacagtcttcaaggatccttataatctcctcattgccaaaatcagtaacatctataaccttgacaacaccctagcttgggctgttgcttctctggctacttgtttttccatcccagtttacccagattttagatggatactcctccaattctgcttaaagtccttacctgttcttgcccagttccctctagtcaacctcagtcactcccaaagattcttccccaatcccatatcttttgctcagacctctgtctctgggatttctttgttacctcatagtcagtagtcctaaaaacaaaattcttcatcttgcatctctatcgaccgaccattctttgtttctttttaagaaatgtaaccttcaccccaatcatcaaaatctctcattcctcaattgtcacaggttgtcacttctttccccctaaacctctcccatcattccttccttctttatactgcccttacaggtcctgatcctctgactcacccggacattcttagcagctgcctaatttcactccctgactctcatctccctcttccaatccttttcattgtgctagaacactatcttgctaattttaatatcctctgcattcagtgcctccacagattgccccctcactgacctttccaatttggccttgtgttacacactttcctcgctgcattcctacccagcatcttcacttgtcatatttctcaaatactcttcatgaccagatatttaaagtacctcatccatgaagacttcatcaacccccaaagtgcctccaatgcttccgtggtagcacagcataatggggtacatttcttagttgaacagtgaggagtcactgggattcttacagagtgtcttagggtctcctcttgatactctttccacatttcagttaaggaattttcttacatctttttttcttctaataacctttgcctggagtgtaagtaaattcatgatagagactgtcatttttaaaaaaaaaaacaaaccattttgcctttcacatgttattacctccatctttctgttatcttgtcagtgttgccacctaaatgattgaaaatgaccgagcatgcagtagaatgtagtgaagtttcctatttcatccattttttgcataagtgcattggtatctgtatatccatctgcccaagcaccagttgttgaaaagactattatttccccatgaatggtcctggtacccttgtcaaagaacagttgaccataaatataagactttctggattctcagtcttactccattgccctatatgtctgtcgttataccagcaccgcactgtcttgatggctgtagcttggtagtaagtttagatttgggatgtgcaagtcctccattttttttttttttttccccaaaatcattttgtctgttttgggtcccttgcattgcatatgaatttttatatgatcattgtgtcaattcctgcaaaacagctgggatcttgatagggatttagttgaattggtagataaatttgagaaataactgctattttaatggtgttaggttttctgttccatgactgtgggatgtctttgcatttgcttaggtctttatttcagtgatgttttagagatttcagtgtgcaagtcttgacgtctttaatttttttctaagtattttactgatgccactttaattatatgattattttctaatttttatttttgtattcatcactggtgttagaaataaaattaatttttgtatattgattttgtatattgtagcttttctaaaattctttttttgtcacttagtattttttgcatatgagatcatgcatctgtgaacagaaatacttttacttcttcctttccagtctagattcctattatttcattttcttgccttagtgtgctggctagcacctccagtacaatattggatagaagtgacaagagcagacatctttttcttgttcctgattttaaggggaaagcattcagtctttcaccattgagtatgatgttagctagctgtgggtttgcttcaagttgaggaaattcttttattaaacctagtttactgagtgttttttaatcaaaaaaaaaaaaaggaggggctgtgggttttgttaaatgcttcttctgtatcaagattttcatgttgttttgtcctttattaatatgttgtattaatggacttttgtatattgaattaactttgcattcctgggataatctcagttgtccatgctacataaaccttgttctatgctgctgga

SEQ ID NO: 640 - DNA, 8841 bp, Homo sapiens
  source 1..8841: mol_type = genomic DNA
agtcctcccgtcttgcgccgcggccgcgagatccgtgtgtctcccaagatggtggcgctgggctcggggtgactacaggagacgacggggccttttcccttcgccaggacccgacacaccaggcttcgctcgctcgcgcacccctccgccgcgtagccatccgccagcgcgggcgcccgccatccgccgcctacttacgcttcacctctgccgacccggcgcgctcggctgcgggcggcggcgcctccttcggctcctcctcggaatagctcgcggcctgtagcccctggcaggagggcccctcagccccccggtgtggacaggcagcggcggctggcgacgaacgccgggatttcggcggccccggcgctccctttcccggcctcgttttccggataaggaagcgcgggtcccgcatgagccccggcggtggcggcagcgaaagagaacgaggcggtggcgggcggaggcggcgggcgagggcgactacgaccagtgaggcggccgccgcagcccaggcgcgggggcgacgacaggttaaaaatctgtaagagcctgattttagaattcaccagctcctcagaagtttggcgaaatatgagttattaagcctacgctcagatcaaggtagcagctagactggtgtgacaacctgtttttaatcagtgactcaaagctgtgatcaccctgatgtcaccgaatggccacagcttgtaaaagatcaggagaacctcagtctgacgacattgaagctagccgaatacacaggagcccatgaaaggcatcacgtgtggaaggaagtgacacgagtcatagtctgccctgcttttctaccacctgaagcatcatataaacctatatcttctgtttcaaatgaagcgagcagctgcaaagcatctaatagaacgctactaccaccagttaactgagggctgtggaaatgaagcctgcacgaatgagttttgtgcttcctgtccaacttttcttcgtatggataataatgcagcagctattaaagccctcgagctttataagattaatgcaaaactctgtgatcctcatccctccaagaaaggagcaagctcagcttaccttgagaactcgaaaggtgcccccaacaactcctgctctgagataaaaatgaacaagaaaggcgctagaattgattttaaagatgtgacttacttaacagaagagaaggtatatgaaattcttgaattatgtagagaaagagaggattattcccctttaatccgtgttattggaagagttttttctagtgctgaggcattggtacagagcttccggaaagttaaacaacacaccaaggaagaactgaaatctcttcaagcaaaagatgaagacaaagatgaagatgaaaaggaaaaagctgcatgttctgctgctgctatggaagaagactcagaagcatcttcctcaaggataggtgatagctcacagggagacaacaatttgcaaaaattaggccctgatgatgtgtctgtggatattgatgccattagaagggtctacaccagattgctctctaatgaaaaaattgaaactgcctttctcaatgcacttgtatatttgtcacctaacgtggaatgtgacttgacgtatcacaatgtatactctcgagatcctaattatctgaatttgttcattatcgtaatggagaatagaaatctccacagtcctgaatatctggaaatggctttgccattattttgcaaagcgatgagcaagctaccccttgcagcccaaggaaaactgatcagactgtggtctaaatacaatgcagaccagattcggagaatgatggagacatttcagcaacttattacttataaagtcataagcaatgaatttaacagtcgaaatctagtgaatgatgatgatgccattgttgctgcttcgaagtgcttgaaaatggtttactatgcaaatgtagtgggaggggaagtggacacaaatcacaatgaagaagatgatgaagagcccatccctgagtccagcgagctgacacttcaggaacttttgggagaagaaagaagaaacaagaaaggtcctcgagtggaccccctggaaactgaacttggtgttaaaaccctggattgtcgaaaaccacttatcccttttgaagagtttattaatgaaccactgaatgaggttctagaaatggataaagattatacttttttcaaagtagaaacagagaacaaattctcttttatgacatgtccctttatattgaatgctgtcacaaagaatttgggattatattatgacaatagaattcgcatgtacagtgaacgaagaatcactgttctctacagcttagttcaaggacagcagttgaatccatatttgagactcaaagttagacgtgaccatatcatagatgatgcacttgtccggctagagatgatcgctatggaaaatcctgcagacttgaagaagcagttgtatgtggaatttgaaggagaacaaggagttgatgagggaggtgtttccaaagaattttttcagctggttgtggaggaaatcttcaatccagatattggtatgttcacatacgatgaatctacaaaattgttttggtttaatccatcttcttttgaaactgagggtcagtttactctgattggcatagtactgggtctggctatttacaataactgtatactggatgtacattttcccatggttgtctacaggaagctaatggggaaaaaaggaacttttcgtgacttgggagactctcacccagttctatatcagagtttaaaagatttattggagtatgaagggaatgtggaagatgacatgatgatcactttccagatatcacagacagatctttttggtaacccaatgatgtatgatctaaaggaaaatggtgataaaattccaattacaaatgaaaacaggaaggaatttgtcaatctttattctgactacattctcaataaatcagtagaaaaacagttcaaggcttttcggagaggttttcatatggtgaccaatgaatctcccttaaagtacttattcagaccagaagaaattgaattgcttatatgtggaagccggaatctagatttccaagcactagaagaaactacagaatatgacggtggctataccagggactctgttctgattagggagttctgggaaatcgttcattcatttacagatgaacagaaaagactcttcttgcagtttacaacgggcacagacagagcacctgtgggaggactaggaaaattaaagatgattatagccaaaaatggcccagacacagaaaggttacctacatctcatacttgctttaatgtgcttttacttccggaatactcaagcaaagaaaaacttaaagagagattgttgaaggccatcacgtatgccaaaggatttggcatgctgtaaaacaaaacaaaacaaaataaaacaaaaaaaaggaaggaaaaaaaaagaaaaaatttaaaaaattttaaaaatataacgagggataaatttttggtggtgatagtgtcccagtacaaaaaggctgtaagatagtcaaccacagtagtcacctatgtctgtgcctcccttctttattggggacatgtgggctggaacagcagatttcagctacatatatgaacaaatcctttattattattataattatttttttgcgtgaaagtgttacatattctttcacttgtatgtacagagaggtttttctgaatatttattttaagggttaaatcacttttgcttgtgtttattactgcttgaggttgagccttttgagtatttaaaaaatatataccaacagaactactctcccaaggaaaatattgccaccatttgtagaccacgtaaccttcaagtatgtgctacttttttgtccctgtatctaactcaaatcaggaactgtattttttttaatgatttgcttttgaaacttgaagtcttgaaaacagtgtgatgcaattactgctgttctagcccccaaagagttttctgtgcaaaatcttgagaatcaatcaataaagaaagatggaaggaagggagaaattggaatgttttaactgcagccctcagaactttagtaacagcacaacaaattaaaaacaaaaacaactcatgccacagtatgtcgtcttcatgtgtcttgcaatgaactgtttcagtagccaatcctctttcttagtatatgaaaggacagggatttttgttcttgttgttctcgttgttgttttaagtttactggggaaagtgcatttggccaaatgaaatggtagtcaagcctattgcaacaaagttaggaagtttgttgtttgtttattataaacaaaaagcatgtgaaagtgcacttaagatagagtttttattaattacttacttattacctagattttaaatagacaatccaaagtctccccttcgtgttgccatcatcttgttgaatcagccattttatcgaggcacgtgatcagtgttgcaacataatgaaaaagatggctactgtgccttgtgttacttaatcatacagtaagctgacctggaaatgaatgaaactattactcctaagaattacattgtatagccccacagattaaatttaattaattaattcaaaacatgttaaacgttactttcatgtactatggaaaagtacaagtaggtttacattactgatttccagaagtaagtagtttcccctttcctagtcttctgtgtatgtgatgttgttaatttcttttattgcattataaaataaaaggattatgtatttttaactaaggtgagacattgatatatccttttgctacaagctatagctaatgtgctgagcttgtgccttggtgattgattgattgattgactgattgttttaactgattactgtagatcaacctgatgatttgtttgtttgaaattggcaggaaaaatgcagctttcaaatcattggggggagaaaaaggatgtctttcaggattattttaattaatttttttcataattgagacagaactgtttgttatgtaccataatgctaaataaaactgtggcacttttcaccataatttaatttagtggaaaaagaagacaatgctttccatattgtgataaggtaacatggggtttttctgggccagcctttagaacactgttagggtacatacgctaccttgatgaaagggaccttcgtgcaactgtagtcatcttaaaggcttctcatccactgtgcttcttaatgtgtaattaaagtgaggagaaattaaatactctgagggcgttttatataataaattcgtgaagaaatgtgtgctcttcagttctcaagttttattattatggtatttattaaagttctacaattgtaataacgtatccatatgacaagttttaaagtggtaattgaaataggttatcagatatagagttgttcacatcaagtagacttttaacagagtcagaatgaacctacccttaaaattttagagaaaaaaaatcgtcggttgcacagaatagctgctctagcttgcttaattatgccgggcatgttgtcactcctcttacttttgctgccttttcattactatttaatggaatgtccctgaacaataaggaagagcaaaacatagacattttgactacagtggatacttcctctaccccaaatgttatgttataaaagtactttttttgcccaggtactctattatatattttggttttctttgaattagacctcaatctccaggaagctctggagggaaaaaaaggaaccataaactaaagtaactggttttccaaataaatgtaaacttttttaaccttttattattatagaacatttcaaacatacataaaacatgaaaacagcctgcagccaaacttttctggaccttggcagctccagcaaatgagctggtcatcctaaccctggtttcctgagacaactacttttggggatgcttgcttgtatagggagatgatagatagatagatacatatcaaaaagaaacttgaaaaaggcttcgaacagaacttgccgatgttactcatccctcctcggtacagacattctgttagaacagatggttgtaatggggcagcatcactccctattcccattaaaaacatgaccattctgagatttcaggccccttcgaggaatttttctcaagaattccatacaaactgtcagaggaagaaatgtcgtcccaagactagtccctgtgtagtcttgatccctttacctgcttactgtaattttttttctctgactttccgccagtgtctaagggccatctgtacccctcccacccttccatgagccactgtataatccaaaaacacaccttccatttgctccctcacttgtctccttttacctcaacagtgttagtgtgtaaagaattgcctggggagggtagagggttttacaagtacagagtcccaagtcttttctcccctccccgttagtgggttggcatttattaataggcactgcaagattttgatgcaggtgtggggtagatatcactgtgaaaggctactaatgcatggtagtttcaccgaaagtacagtcttcaaggatccttataatctcctcattgccaaaatcagtaacatctataaccttgacaacaccctagcttgggctgttgcttctctggctacttgtttttccatcccagtttacccagattttagatggatactcctccaattctgcttaaagtccttacctgttcttgcccagttccctctagtcaacctcagtcactcccaaagattcttccccaatcccatatcttttgctcagacctctgtctctgggatttctttgttacctcatagtcagtagtcctaaaaacaaaattcttcatcttgcatctctatcgaccgaccattctttgtttctttttaagaaatgtaaccttcaccccaatcatcaaaatctctcattcctcaattgtcacaggttgtcacttctttccccctaaacctctcccatcattccttccttctttatactgcccttacaggtcctgatcctctgactcacccggacattcttagcagctgcctaatttcactccctgactctcatctccctcttccaatccttttcattgtgctagaacactatcttgctaattttaatatcctctgcattcagtgcctccacagattgccccctcactgacctttccaatttggccttgtgttacacactttcctcgctgcattcctacccagcatcttcacttgtcatatttctcaaatactcttcatgaccagatatttaaagtacctcatccatgaagacttcatcaacccccaaagtgcctccaatgcttccgtggtagcacagcataatggggtacatttcttagttgaacagtgaggagtcactgggattcttacagagtgtcttagggtctcctcttgatactctttccacatttcagttaaggaattttcttacatctttttttcttctaataacctttgcctggagtgtaagtaaattcatgatagagactgtcatttttaaaaaaaaaaacaaaccattttgcctttcacatgttattacctccatctttctgttatcttgtcagtgttgccacctaaatgattgaaaatgaccgagcatgcagtagaatgtagtgaagtttcctatttcatccattttttgcataagtgcattggtatctgtatatccatctgcccaagcaccagttgttgaaaagactattatttccccatgaatggtcctggtacccttgtcaaagaacagttgaccataaatataagactttctggattctcagtcttactccattgccctatatgtctgtcgttataccagcaccgcactgtcttgatggctgtagcttggtagtaagtttagatttgggatgtgcaagtcctccattttttttttttttttccccaaaatcattttgtctgttttgggtcccttgcattgcatatgaatttttatatgatcattgtgtcaattcctgcaaaacagctgggatcttgatagggatttagttgaattggtagataaatttgagaaataactgctattttaatggtgttaggttttctgttccatgactgtgggatgtctttgcatttgcttaggtctttatttcagtgatgttttagagatttcagtgtgcaagtcttgacgtctttaatttttttctaagtattttactgatgccactttaattatatgattattttctaatttttatttttgtattcatcactggtgttagaaataaaattaatttttgtatattgattttgtatattgtagcttttctaaaattctttttttgtcacttagtattttttgcatatgagatcatgcatctgtgaacagaaatacttttacttcttcctttccagtctagattcctattatttcattttcttgccttagtgtgctggctagcacctccagtacaatattggatagaagtgacaagagcagacatctttttcttgttcctgattttaaggggaaagcattcagtctttcaccattgagtatgatgttagctagctgtgggtttgcttcaagttgaggaaattcttttattaaacctagtttactgagtgttttttaatcaaaaaaaaaaaaaggaggggctgtgggttttgttaaatgcttcttctgtatcaagattttcatgttgttttgtcctttattaatatgttgtattaatggacttttgtatattgaattaactttgcattcctgggataatctcagttgtccatgctacataaaccttgttctatgctgctgga

SEQ ID NO: 641 - DNA, 8799 bp, Homo sapiens
  source 1..8799: mol_type = genomic DNA
agtcctcccgtcttgcgccgcggccgcgagatccgtgtgtctcccaagatggtggcgctgggctcggggtgactacaggagacgacggggccttttcccttcgccaggacccgacacaccaggcttcgctcgctcgcgcacccctccgccgcgtagccatccgccagcgcgggcgcccgccatccgccgcctacttacgcttcacctctgccgacccggcgcgctcggctgcgggcggcggcgcctccttcggctcctcctcggaatagctcgcggcctgtagcccctggcaggagggcccctcagccccccggtgtggacaggcagcggcggctggcgacgaacgccgggatttcggcggccccggcgctccctttcccggcctcgttttccggataaggaagcgcgggtcccgcatgagccccggcggtggcggcagcgaaagagaacgaggcggtggcgggcggaggcggcgggcgagggcgactacgaccagtgaggcggccgccgcagcccaggcgcgggggcgacgacaggttaaaaatctgtaagagcctgattttagaattcaccagctcctcagaagtttggcgaaatatgagttattaagcctacgctcagatcaaggtagcagctagactggtgtgacaacctgtttttaatcagtgactcaaagctgtgatcaccctgatgtcaccgaatggccacagcttgtaaaagctcttctgtctgggagatacaagtttggaagcaatcttggggtacttacccacaaggctggtggagaccagatcaggagaacctcagtctgacgacattgaagctagccgaatgaagcgagcagctgcaaagcatctaatagaacgctactaccaccagttaactgagggctgtggaaatgaagcctgcacgaatgagttttgtgcttcctgtccaacttttcttcgtatggataataatgcagcagctattaaagccctcgagctttataagattaatgcaaaactctgtgatcctcatccctccaagaaaggagcaagctcagcttaccttgagaactcgaaaggtgcccccaacaactcctgctctgagataaaaatgaacaagaaaggcgctagaattgattttaaagatgtgacttacttaacagaagagaaggtatatgaaattcttgaattatgtagagaaagagaggattattcccctttaatccgtgttattggaagagttttttctagtgctgaggcattggtacagagcttccggaaagttaaacaacacaccaaggaagaactgaaatctcttcaagcaaaagatgaagacaaagatgaagatgaaaaggaaaaagctgcatgttctgctgctgctatggaagaagactcagaagcatcttcctcaaggataggtgatagctcacagggagacaacaatttgcaaaaattaggccctgatgatgtgtctgtggatattgatgccattagaagggtctacaccagattgctctctaatgaaaaaattgaaactgcctttctcaatgcacttgtatatttgtcacctaacgtggaatgtgacttgacgtatcacaatgtatactctcgagatcctaattatctgaatttgttcattatcgtaatggagaatagaaatctccacagtcctgaatatctggaaatggctttgccattattttgcaaagcgatgagcaagctaccccttgcagcccaaggaaaactgatcagactgtggtctaaatacaatgcagaccagattcggagaatgatggagacatttcagcaacttattacttataaagtcataagcaatgaatttaacagtcgaaatctagtgaatgatgatgatgccattgttgctgcttcgaagtgcttgaaaatggtttactatgcaaatgtagtgggaggggaagtggacacaaatcacaatgaagaagatgatgaagagcccatccctgagtccagcgagctgacacttcaggaacttttgggagaagaaagaagaaacaagaaaggtcctcgagtggaccccctggaaactgaacttggtgttaaaaccctggattgtcgaaaaccacttatcccttttgaagagtttattaatgaaccactgaatgaggttctagaaatggataaagattatacttttttcaaagtagaaacagagaacaaattctcttttatgacatgtccctttatattgaatgctgtcacaaagaatttgggattatattatgacaatagaattcgcatgtacagtgaacgaagaatcactgttctctacagcttagttcaaggacagcagttgaatccatatttgagactcaaagttagacgtgaccatatcatagatgatgcacttgtccggctagagatgatcgctatggaaaatcctgcagacttgaagaagcagttgtatgtggaatttgaaggagaacaaggagttgatgagggaggtgtttccaaagaattttttcagctggttgtggaggaaatcttcaatccagatattggtatgttcacatacgatgaatctacaaaattgttttggtttaatccatcttcttttgaaactgagggtcagtttactctgattggcatagtactgggtctggctatttacaataactgtatactggatgtacattttcccatggttgtctacaggaagctaatggggaaaaaaggaacttttcgtgacttgggagactctcacccagttctatatcagagtttaaaagatttattggagtatgaagggaatgtggaagatgacatgatgatcactttccagatatcacagacagatctttttggtaacccaatgatgtatgatctaaaggaaaatggtgataaaattccaattacaaatgaaaacaggaaggaatttgtcaatctttattctgactacattctcaataaatcagtagaaaaacagttcaaggcttttcggagaggttttcatatggtgaccaatgaatctcccttaaagtacttattcagaccagaagaaattgaattgcttatatgtggaagccggaatctagatttccaagcactagaagaaactacagaatatgacggtggctataccagggactctgttctgattagggagttctgggaaatcgttcattcatttacagatgaacagaaaagactcttcttgcagtttacaacgggcacagacagagcacctgtgggaggactaggaaaattaaagatgattatagccaaaaatggcccagacacagaaaggttacctacatctcatacttgctttaatgtgcttttacttccggaatactcaagcaaagaaaaacttaaagagagattgttgaaggccatcacgtatgccaaaggatttggcatgctgtaaaacaaaacaaaacaaaataaaacaaaaaaaaggaaggaaaaaaaaagaaaaaatttaaaaaattttaaaaatataacgagggataaatttttggtggtgatagtgtcccagtacaaaaaggctgtaagatagtcaaccacagtagtcacctatgtctgtgcctcccttctttattggggacatgtgggctggaacagcagatttcagctacatatatgaacaaatcctttattattattataattatttttttgcgtgaaagtgttacatattctttcacttgtatgtacagagaggtttttctgaatatttattttaagggttaaatcacttttgcttgtgtttattactgcttgaggttgagccttttgagtatttaaaaaatatataccaacagaactactctcccaaggaaaatattgccaccatttgtagaccacgtaaccttcaagtatgtgctacttttttgtccctgtatctaactcaaatcaggaactgtattttttttaatgatttgcttttgaaacttgaagtcttgaaaacagtgtgatgcaattactgctgttctagcccccaaagagttttctgtgcaaaatcttgagaatcaatcaataaagaaagatggaaggaagggagaaattggaatgttttaactgcagccctcagaactttagtaacagcacaacaaattaaaaacaaaaacaactcatgccacagtatgtcgtcttcatgtgtcttgcaatgaactgtttcagtagccaatcctctttcttagtatatgaaaggacagggatttttgttcttgttgttctcgttgttgttttaagtttactggggaaagtgcatttggccaaatgaaatggtagtcaagcctattgcaacaaagttaggaagtttgttgtttgtttattataaacaaaaagcatgtgaaagtgcacttaagatagagtttttattaattacttacttattacctagattttaaatagacaatccaaagtctccccttcgtgttgccatcatcttgttgaatcagccattttatcgaggcacgtgatcagtgttgcaacataatgaaaaagatggctactgtgccttgtgttacttaatcatacagtaagctgacctggaaatgaatgaaactattactcctaagaattacattgtatagccccacagattaaatttaattaattaattcaaaacatgttaaacgttactttcatgtactatggaaaagtacaagtaggtttacattactgatttccagaagtaagtagtttcccctttcctagtcttctgtgtatgtgatgttgttaatttcttttattgcattataaaataaaaggattatgtatttttaactaaggtgagacattgatatatccttttgctacaagctatagctaatgtgctgagcttgtgccttggtgattgattgattgattgactgattgttttaactgattactgtagatcaacctgatgatttgtttgtttgaaattggcaggaaaaatgcagctttcaaatcattggggggagaaaaaggatgtctttcaggattattttaattaatttttttcataattgagacagaactgtttgttatgtaccataatgctaaataaaactgtggcacttttcaccataatttaatttagtggaaaaagaagacaatgctttccatattgtgataaggtaacatggggtttttctgggccagcctttagaacactgttagggtacatacgctaccttgatgaaagggaccttcgtgcaactgtagtcatcttaaaggcttctcatccactgtgcttcttaatgtgtaattaaagtgaggagaaattaaatactctgagggcgttttatataataaattcgtgaagaaatgtgtgctcttcagttctcaagttttattattatggtatttattaaagttctacaattgtaataacgtatccatatgacaagttttaaagtggtaattgaaataggttatcagatatagagttgttcacatcaagtagacttttaacagagtcagaatgaacctacccttaaaattttagagaaaaaaaatcgtcggttgcacagaatagctgctctagcttgcttaattatgccgggcatgttgtcactcctcttacttttgctgccttttcattactatttaatggaatgtccctgaacaataaggaagagcaaaacatagacattttgactacagtggatacttcctctaccccaaatgttatgttataaaagtactttttttgcccaggtactctattatatattttggttttctttgaattagacctcaatctccaggaagctctggagggaaaaaaaggaaccataaactaaagtaactggttttccaaataaatgtaaacttttttaaccttttattattatagaacatttcaaacatacataaaacatgaaaacagcctgcagccaaacttttctggaccttggcagctccagcaaatgagctggtcatcctaaccctggtttcctgagacaactacttttggggatgcttgcttgtatagggagatgatagatagatagatacatatcaaaaagaaacttgaaaaaggcttcgaacagaacttgccgatgttactcatccctcctcggtacagacattctgttagaacagatggttgtaatggggcagcatcactccctattcccattaaaaacatgaccattctgagatttcaggccccttcgaggaatttttctcaagaattccatacaaactgtcagaggaagaaatgtcgtcccaagactagtccctgtgtagtcttgatccctttacctgcttactgtaattttttttctctgactttccgccagtgtctaagggccatctgtacccctcccacccttccatgagccactgtataatccaaaaacacaccttccatttgctccctcacttgtctccttttacctcaacagtgttagtgtgtaaagaattgcctggggagggtagagggttttacaagtacagagtcccaagtcttttctcccctccccgttagtgggttggcatttattaataggcactgcaagattttgatgcaggtgtggggtagatatcactgtgaaaggctactaatgcatggtagtttcaccgaaagtacagtcttcaaggatccttataatctcctcattgccaaaatcagtaacatctataaccttgacaacaccctagcttgggctgttgcttctctggctacttgtttttccatcccagtttacccagattttagatggatactcctccaattctgcttaaagtccttacctgttcttgcccagttccctctagtcaacctcagtcactcccaaagattcttccccaatcccatatcttttgctcagacctctgtctctgggatttctttgttacctcatagtcagtagtcctaaaaacaaaattcttcatcttgcatctctatcgaccgaccattctttgtttctttttaagaaatgtaaccttcaccccaatcatcaaaatctctcattcctcaattgtcacaggttgtcacttctttccccctaaacctctcccatcattccttccttctttatactgcccttacaggtcctgatcctctgactcacccggacattcttagcagctgcctaatttcactccctgactctcatctccctcttccaatccttttcattgtgctagaacactatcttgctaattttaatatcctctgcattcagtgcctccacagattgccccctcactgacctttccaatttggccttgtgttacacactttcctcgctgcattcctacccagcatcttcacttgtcatatttctcaaatactcttcatgaccagatatttaaagtacctcatccatgaagacttcatcaacccccaaagtgcctccaatgcttccgtggtagcacagcataatggggtacatttcttagttgaacagtgaggagtcactgggattcttacagagtgtcttagggtctcctcttgatactctttccacatttcagttaaggaattttcttacatctttttttcttctaataacctttgcctggagtgtaagtaaattcatgatagagactgtcatttttaaaaaaaaaaacaaaccattttgcctttcacatgttattacctccatctttctgttatcttgtcagtgttgccacctaaatgattgaaaatgaccgagcatgcagtagaatgtagtgaagtttcctatttcatccattttttgcataagtgcattggtatctgtatatccatctgcccaagcaccagttgttgaaaagactattatttccccatgaatggtcctggtacccttgtcaaagaacagttgaccataaatataagactttctggattctcagtcttactccattgccctatatgtctgtcgttataccagcaccgcactgtcttgatggctgtagcttggtagtaagtttagatttgggatgtgcaagtcctccattttttttttttttttccccaaaatcattttgtctgttttgggtcccttgcattgcatatgaatttttatatgatcattgtgtcaattcctgcaaaacagctgggatcttgatagggatttagttgaattggtagataaatttgagaaataactgctattttaatggtgttaggttttctgttccatgactgtgggatgtctttgcatttgcttaggtctttatttcagtgatgttttagagatttcagtgtgcaagtcttgacgtctttaatttttttctaagtattttactgatgccactttaattatatgattattttctaatttttatttttgtattcatcactggtgttagaaataaaattaatttttgtatattgattttgtatattgtagcttttctaaaattctttttttgtcacttagtattttttgcatatgagatcatgcatctgtgaacagaaatacttttacttcttcctttccagtctagattcctattatttcattttcttgccttagtgtgctggctagcacctccagtacaatattggatagaagtgacaagagcagacatctttttcttgttcctgattttaaggggaaagcattcagtctttcaccattgagtatgatgttagctagctgtgggtttgcttcaagttgaggaaattcttttattaaacctagtttactgagtgttttttaatcaaaaaaaaaaaaaggaggggctgtgggttttgttaaatgcttcttctgtatcaagattttcatgttgttttgtcctttattaatatgttgtattaatggacttttgtatattgaattaactttgcattcctgggataatctcagttgtccatgctacataaaccttgttctatgctgctgga

SEQ ID NO: 642 - DNA, 8874 bp, Homo sapiens
  source 1..8874: mol_type = genomic DNA
agtcctcccgtcttgcgccgcggccgcgagatccgtgtgtctcccaagatggtggcgctgggctcggggtgactacaggagacgacggggccttttcccttcgccaggacccgacacaccaggcttcgctcgctcgcgcacccctccgccgcgtagccatccgccagcgcgggcgcccgccatccgccgcctacttacgcttcacctctgccgacccggcgcgctcggctgcgggcggcggcgcctccttcggctcctcctcggaatagctcgcggcctgtagcccctggcaggagggcccctcagccccccggtgtggacaggcagcggcggctggcgacgaacgccgggatttcggcggccccggcgctccctttcccggcctcgttttccggataaggaagcgcgggtcccgcatgagccccggcggtggcggcagcgaaagagaacgaggcggtggcgggcggaggcggcgggcgagggcgactacgaccagtgaggcggccgccgcagcccaggcgcgggggcgacgacaggttaaaaatctgtaagagcctgattttagaattcaccagctcctcagaagtttggcgaaatatgagttattaagcctacgctcagatcaaggtagcagctagactggtgtgacaacctgtttttaatcagtgactcaaagctgtgatcaccctgatgtcaccgaatggccacagcttgtaaaagtatgacatctgatgctggagggtcgcactttcaaaaatgagtcagctggtacatggggttatcatcaatttttagctcttctgtctgggagatacaagtttggaagcaatcttggggtacttacccacaaggctggtggagaccagatcaggagaacctcagtctgacgacattgaagctagccgaatgaagcgagcagctgcaaagcatctaatagaacgctactaccaccagttaactgagggctgtggaaatgaagcctgcacgaatgagttttgtgcttcctgtccaacttttcttcgtatggataataatgcagcagctattaaagccctcgagctttataagattaatgcaaaactctgtgatcctcatccctccaagaaaggagcaagctcagcttaccttgagaactcgaaaggtgcccccaacaactcctgctctgagataaaaatgaacaagaaaggcgctagaattgattttaaagatgtgacttacttaacagaagagaaggtatatgaaattcttgaattatgtagagaaagagaggattattcccctttaatccgtgttattggaagagttttttctagtgctgaggcattggtacagagcttccggaaagttaaacaacacaccaaggaagaactgaaatctcttcaagcaaaagatgaagacaaagatgaagatgaaaaggaaaaagctgcatgttctgctgctgctatggaagaagactcagaagcatcttcctcaaggataggtgatagctcacagggagacaacaatttgcaaaaattaggccctgatgatgtgtctgtggatattgatgccattagaagggtctacaccagattgctctctaatgaaaaaattgaaactgcctttctcaatgcacttgtatatttgtcacctaacgtggaatgtgacttgacgtatcacaatgtatactctcgagatcctaattatctgaatttgttcattatcgtaatggagaatagaaatctccacagtcctgaatatctggaaatggctttgccattattttgcaaagcgatgagcaagctaccccttgcagcccaaggaaaactgatcagactgtggtctaaatacaatgcagaccagattcggagaatgatggagacatttcagcaacttattacttataaagtcataagcaatgaatttaacagtcgaaatctagtgaatgatgatgatgccattgttgctgcttcgaagtgcttgaaaatggtttactatgcaaatgtagtgggaggggaagtggacacaaatcacaatgaagaagatgatgaagagcccatccctgagtccagcgagctgacacttcaggaacttttgggagaagaaagaagaaacaagaaaggtcctcgagtggaccccctggaaactgaacttggtgttaaaaccctggattgtcgaaaaccacttatcccttttgaagagtttattaatgaaccactgaatgaggttctagaaatggataaagattatacttttttcaaagtagaaacagagaacaaattctcttttatgacatgtccctttatattgaatgctgtcacaaagaatttgggattatattatgacaatagaattcgcatgtacagtgaacgaagaatcactgttctctacagcttagttcaaggacagcagttgaatccatatttgagactcaaagttagacgtgaccatatcatagatgatgcacttgtccggctagagatgatcgctatggaaaatcctgcagacttgaagaagcagttgtatgtggaatttgaaggagaacaaggagttgatgagggaggtgtttccaaagaattttttcagctggttgtggaggaaatcttcaatccagatattggtatgttcacatacgatgaatctacaaaattgttttggtttaatccatcttcttttgaaactgagggtcagtttactctgattggcatagtactgggtctggctatttacaataactgtatactggatgtacattttcccatggttgtctacaggaagctaatggggaaaaaaggaacttttcgtgacttgggagactctcacccagttctatatcagagtttaaaagatttattggagtatgaagggaatgtggaagatgacatgatgatcactttccagatatcacagacagatctttttggtaacccaatgatgtatgatctaaaggaaaatggtgataaaattccaattacaaatgaaaacaggaaggaatttgtcaatctttattctgactacattctcaataaatcagtagaaaaacagttcaaggcttttcggagaggttttcatatggtgaccaatgaatctcccttaaagtacttattcagaccagaagaaattgaattgcttatatgtggaagccggaatctagatttccaagcactagaagaaactacagaatatgacggtggctataccagggactctgttctgattagggagttctgggaaatcgttcattcatttacagatgaacagaaaagactcttcttgcagtttacaacgggcacagacagagcacctgtgggaggactaggaaaattaaagatgattatagccaaaaatggcccagacacagaaaggttacctacatctcatacttgctttaatgtgcttttacttccggaatactcaagcaaagaaaaacttaaagagagattgttgaaggccatcacgtatgccaaaggatttggcatgctgtaaaacaaaacaaaacaaaataaaacaaaaaaaaggaaggaaaaaaaaagaaaaaatttaaaaaattttaaaaatataacgagggataaatttttggtggtgatagtgtcccagtacaaaaaggctgtaagatagtcaaccacagtagtcacctatgtctgtgcctcccttctttattggggacatgtgggctggaacagcagatttcagctacatatatgaacaaatcctttattattattataattatttttttgcgtgaaagtgttacatattctttcacttgtatgtacagagaggtttttctgaatatttattttaagggttaaatcacttttgcttgtgtttattactgcttgaggttgagccttttgagtatttaaaaaatatataccaacagaactactctcccaaggaaaatattgccaccatttgtagaccacgtaaccttcaagtatgtgctacttttttgtccctgtatctaactcaaatcaggaactgtattttttttaatgatttgcttttgaaacttgaagtcttgaaaacagtgtgatgcaattactgctgttctagcccccaaagagttttctgtgcaaaatcttgagaatcaatcaataaagaaagatggaaggaagggagaaattggaatgttttaactgcagccctcagaactttagtaacagcacaacaaattaaaaacaaaaacaactcatgccacagtatgtcgtcttcatgtgtcttgcaatgaactgtttcagtagccaatcctctttcttagtatatgaaaggacagggatttttgttcttgttgttctcgttgttgttttaagtttactggggaaagtgcatttggccaaatgaaatggtagtcaagcctattgcaacaaagttaggaagtttgttgtttgtttattataaacaaaaagcatgtgaaagtgcacttaagatagagtttttattaattacttacttattacctagattttaaatagacaatccaaagtctccccttcgtgttgccatcatcttgttgaatcagccattttatcgaggcacgtgatcagtgttgcaacataatgaaaaagatggctactgtgccttgtgttacttaatcatacagtaagctgacctggaaatgaatgaaactattactcctaagaattacattgtatagccccacagattaaatttaattaattaattcaaaacatgttaaacgttactttcatgtactatggaaaagtacaagtaggtttacattactgatttccagaagtaagtagtttcccctttcctagtcttctgtgtatgtgatgttgttaatttcttttattgcattataaaataaaaggattatgtatttttaactaaggtgagacattgatatatccttttgctacaagctatagctaatgtgctgagcttgtgccttggtgattgattgattgattgactgattgttttaactgattactgtagatcaacctgatgatttgtttgtttgaaattggcaggaaaaatgcagctttcaaatcattggggggagaaaaaggatgtctttcaggattattttaattaatttttttcataattgagacagaactgtttgttatgtaccataatgctaaataaaactgtggcacttttcaccataatttaatttagtggaaaaagaagacaatgctttccatattgtgataaggtaacatggggtttttctgggccagcctttagaacactgttagggtacatacgctaccttgatgaaagggaccttcgtgcaactgtagtcatcttaaaggcttctcatccactgtgcttcttaatgtgtaattaaagtgaggagaaattaaatactctgagggcgttttatataataaattcgtgaagaaatgtgtgctcttcagttctcaagttttattattatggtatttattaaagttctacaattgtaataacgtatccatatgacaagttttaaagtggtaattgaaataggttatcagatatagagttgttcacatcaagtagacttttaacagagtcagaatgaacctacccttaaaattttagagaaaaaaaatcgtcggttgcacagaatagctgctctagcttgcttaattatgccgggcatgttgtcactcctcttacttttgctgccttttcattactatttaatggaatgtccctgaacaataaggaagagcaaaacatagacattttgactacagtggatacttcctctaccccaaatgttatgttataaaagtactttttttgcccaggtactctattatatattttggttttctttgaattagacctcaatctccaggaagctctggagggaaaaaaaggaaccataaactaaagtaactggttttccaaataaatgtaaacttttttaaccttttattattatagaacatttcaaacatacataaaacatgaaaacagcctgcagccaaacttttctggaccttggcagctccagcaaatgagctggtcatcctaaccctggtttcctgagacaactacttttggggatgcttgcttgtatagggagatgatagatagatagatacatatcaaaaagaaacttgaaaaaggcttcgaacagaacttgccgatgttactcatccctcctcggtacagacattctgttagaacagatggttgtaatggggcagcatcactccctattcccattaaaaacatgaccattctgagatttcaggccccttcgaggaatttttctcaagaattccatacaaactgtcagaggaagaaatgtcgtcccaagactagtccctgtgtagtcttgatccctttacctgcttactgtaattttttttctctgactttccgccagtgtctaagggccatctgtacccctcccacccttccatgagccactgtataatccaaaaacacaccttccatttgctccctcacttgtctccttttacctcaacagtgttagtgtgtaaagaattgcctggggagggtagagggttttacaagtacagagtcccaagtcttttctcccctccccgttagtgggttggcatttattaataggcactgcaagattttgatgcaggtgtggggtagatatcactgtgaaaggctactaatgcatggtagtttcaccgaaagtacagtcttcaaggatccttataatctcctcattgccaaaatcagtaacatctataaccttgacaacaccctagcttgggctgttgcttctctggctacttgtttttccatcccagtttacccagattttagatggatactcctccaattctgcttaaagtccttacctgttcttgcccagttccctctagtcaacctcagtcactcccaaagattcttccccaatcccatatcttttgctcagacctctgtctctgggatttctttgttacctcatagtcagtagtcctaaaaacaaaattcttcatcttgcatctctatcgaccgaccattctttgtttctttttaagaaatgtaaccttcaccccaatcatcaaaatctctcattcctcaattgtcacaggttgtcacttctttccccctaaacctctcccatcattccttccttctttatactgcccttacaggtcctgatcctctgactcacccggacattcttagcagctgcctaatttcactccctgactctcatctccctcttccaatccttttcattgtgctagaacactatcttgctaattttaatatcctctgcattcagtgcctccacagattgccccctcactgacctttccaatttggccttgtgttacacactttcctcgctgcattcctacccagcatcttcacttgtcatatttctcaaatactcttcatgaccagatatttaaagtacctcatccatgaagacttcatcaacccccaaagtgcctccaatgcttccgtggtagcacagcataatggggtacatttcttagttgaacagtgaggagtcactgggattcttacagagtgtcttagggtctcctcttgatactctttccacatttcagttaaggaattttcttacatctttttttcttctaataacctttgcctggagtgtaagtaaattcatgatagagactgtcatttttaaaaaaaaaaacaaaccattttgcctttcacatgttattacctccatctttctgttatcttgtcagtgttgccacctaaatgattgaaaatgaccgagcatgcagtagaatgtagtgaagtttcctatttcatccattttttgcataagtgcattggtatctgtatatccatctgcccaagcaccagttgttgaaaagactattatttccccatgaatggtcctggtacccttgtcaaagaacagttgaccataaatataagactttctggattctcagtcttactccattgccctatatgtctgtcgttataccagcaccgcactgtcttgatggctgtagcttggtagtaagtttagatttgggatgtgcaagtcctccattttttttttttttttccccaaaatcattttgtctgttttgggtcccttgcattgcatatgaatttttatatgatcattgtgtcaattcctgcaaaacagctgggatcttgatagggatttagttgaattggtagataaatttgagaaataactgctattttaatggtgttaggttttctgttccatgactgtgggatgtctttgcatttgcttaggtctttatttcagtgatgttttagagatttcagtgtgcaagtcttgacgtctttaatttttttctaagtattttactgatgccactttaattatatgattattttctaatttttatttttgtattcatcactggtgttagaaataaaattaatttttgtatattgattttgtatattgtagcttttctaaaattctttttttgtcacttagtattttttgcatatgagatcatgcatctgtgaacagaaatacttttacttcttcctttccagtctagattcctattatttcattttcttgccttagtgtgctggctagcacctccagtacaatattggatagaagtgacaagagcagacatctttttcttgttcctgattttaaggggaaagcattcagtctttcaccattgagtatgatgttagctagctgtgggtttgcttcaagttgaggaaattcttttattaaacctagtttactgagtgttttttaatcaaaaaaaaaaaaaggaggggctgtgggttttgttaaatgcttcttctgtatcaagattttcatgttgttttgtcctttattaatatgttgtattaatggacttttgtatattgaattaactttgcattcctgggataatctcagttgtccatgctacataaaccttgttctatgctgctgga

SEQ ID NO: 643 - DNA, 8890 bp, Homo sapiens
  source 1..8890: mol_type = genomic DNA
agtcctcccgtcttgcgccgcggccgcgagatccgtgtgtctcccaagatggtggcgctgggctcggggtgactacaggagacgacggggccttttcccttcgccaggacccgacacaccaggcttcgctcgctcgcgcacccctccgccgcgtagccatccgccagcgcgggcgcccgccatccgccgcctacttacgcttcacctctgccgacccggcgcgctcggctgcgggcggcggcgcctccttcggctcctcctcggaatagctcgcggcctgtagcccctggcaggagggcccctcagccccccggtgtggacaggcagcggcggctggcgacgaacgccgggatttcggcggccccggcgctccctttcccggcctcgttttccggataaggaagcgcgggtcccgcatgagccccggcggtggcggcagcgaaagagaacgaggcggtggcgggcggaggcggcgggcgagggcgactacgaccagtgaggcggccgccgcagcccaggcgcgggggcgacgacaggttaaaaatctgtaagagcctgattttagaattcaccagctcctcagaagtttggcgaaatatgagttattaagcctacgctcagatcaaggtagcagctagactggtgtgacaacctgtttttaatcagtgactcaaagctgtgatcaccctgatgtcaccgaatggccacagcttgtaaaagctctgcctccttacagtatgacatctgatgctggagggtcgcactttcaaaaatgagtcagctggtacatggggttatcatcaatttttagctcttctgtctgggagatacaagtttggaagcaatcttggggtacttacccacaaggctggtggagaccagatcaggagaacctcagtctgacgacattgaagctagccgaatgaagcgagcagctgcaaagcatctaatagaacgctactaccaccagttaactgagggctgtggaaatgaagcctgcacgaatgagttttgtgcttcctgtccaacttttcttcgtatggataataatgcagcagctattaaagccctcgagctttataagattaatgcaaaactctgtgatcctcatccctccaagaaaggagcaagctcagcttaccttgagaactcgaaaggtgcccccaacaactcctgctctgagataaaaatgaacaagaaaggcgctagaattgattttaaagatgtgacttacttaacagaagagaaggtatatgaaattcttgaattatgtagagaaagagaggattattcccctttaatccgtgttattggaagagttttttctagtgctgaggcattggtacagagcttccggaaagttaaacaacacaccaaggaagaactgaaatctcttcaagcaaaagatgaagacaaagatgaagatgaaaaggaaaaagctgcatgttctgctgctgctatggaagaagactcagaagcatcttcctcaaggataggtgatagctcacagggagacaacaatttgcaaaaattaggccctgatgatgtgtctgtggatattgatgccattagaagggtctacaccagattgctctctaatgaaaaaattgaaactgcctttctcaatgcacttgtatatttgtcacctaacgtggaatgtgacttgacgtatcacaatgtatactctcgagatcctaattatctgaatttgttcattatcgtaatggagaatagaaatctccacagtcctgaatatctggaaatggctttgccattattttgcaaagcgatgagcaagctaccccttgcagcccaaggaaaactgatcagactgtggtctaaatacaatgcagaccagattcggagaatgatggagacatttcagcaacttattacttataaagtcataagcaatgaatttaacagtcgaaatctagtgaatgatgatgatgccattgttgctgcttcgaagtgcttgaaaatggtttactatgcaaatgtagtgggaggggaagtggacacaaatcacaatgaagaagatgatgaagagcccatccctgagtccagcgagctgacacttcaggaacttttgggagaagaaagaagaaacaagaaaggtcctcgagtggaccccctggaaactgaacttggtgttaaaaccctggattgtcgaaaaccacttatcccttttgaagagtttattaatgaaccactgaatgaggttctagaaatggataaagattatacttttttcaaagtagaaacagagaacaaattctcttttatgacatgtccctttatattgaatgctgtcacaaagaatttgggattatattatgacaatagaattcgcatgtacagtgaacgaagaatcactgttctctacagcttagttcaaggacagcagttgaatccatatttgagactcaaagttagacgtgaccatatcatagatgatgcacttgtccggctagagatgatcgctatggaaaatcctgcagacttgaagaagcagttgtatgtggaatttgaaggagaacaaggagttgatgagggaggtgtttccaaagaattttttcagctggttgtggaggaaatcttcaatccagatattggtatgttcacatacgatgaatctacaaaattgttttggtttaatccatcttcttttgaaactgagggtcagtttactctgattggcatagtactgggtctggctatttacaataactgtatactggatgtacattttcccatggttgtctacaggaagctaatggggaaaaaaggaacttttcgtgacttgggagactctcacccagttctatatcagagtttaaaagatttattggagtatgaagggaatgtggaagatgacatgatgatcactttccagatatcacagacagatctttttggtaacccaatgatgtatgatctaaaggaaaatggtgataaaattccaattacaaatgaaaacaggaaggaatttgtcaatctttattctgactacattctcaataaatcagtagaaaaacagttcaaggcttttcggagaggttttcatatggtgaccaatgaatctcccttaaagtacttattcagaccagaagaaattgaattgcttatatgtggaagccggaatctagatttccaagcactagaagaaactacagaatatgacggtggctataccagggactctgttctgattagggagttctgggaaatcgttcattcatttacagatgaacagaaaagactcttcttgcagtttacaacgggcacagacagagcacctgtgggaggactaggaaaattaaagatgattatagccaaaaatggcccagacacagaaaggttacctacatctcatacttgctttaatgtgcttttacttccggaatactcaagcaaagaaaaacttaaagagagattgttgaaggccatcacgtatgccaaaggatttggcatgctgtaaaacaaaacaaaacaaaataaaacaaaaaaaaggaaggaaaaaaaaagaaaaaatttaaaaaattttaaaaatataacgagggataaatttttggtggtgatagtgtcccagtacaaaaaggctgtaagatagtcaaccacagtagtcacctatgtctgtgcctcccttctttattggggacatgtgggctggaacagcagatttcagctacatatatgaacaaatcctttattattattataattatttttttgcgtgaaagtgttacatattctttcacttgtatgtacagagaggtttttctgaatatttattttaagggttaaatcacttttgcttgtgtttattactgcttgaggttgagccttttgagtatttaaaaaatatataccaacagaactactctcccaaggaaaatattgccaccatttgtagaccacgtaaccttcaagtatgtgctacttttttgtccctgtatctaactcaaatcaggaactgtattttttttaatgatttgcttttgaaacttgaagtcttgaaaacagtgtgatgcaattactgctgttctagcccccaaagagttttctgtgcaaaatcttgagaatcaatcaataaagaaagatggaaggaagggagaaattggaatgttttaactgcagccctcagaactttagtaacagcacaacaaattaaaaacaaaaacaactcatgccacagtatgtcgtcttcatgtgtcttgcaatgaactgtttcagtagccaatcctctttcttagtatatgaaaggacagggatttttgttcttgttgttctcgttgttgttttaagtttactggggaaagtgcatttggccaaatgaaatggtagtcaagcctattgcaacaaagttaggaagtttgttgtttgtttattataaacaaaaagcatgtgaaagtgcacttaagatagagtttttattaattacttacttattacctagattttaaatagacaatccaaagtctccccttcgtgttgccatcatcttgttgaatcagccattttatcgaggcacgtgatcagtgttgcaacataatgaaaaagatggctactgtgccttgtgttacttaatcatacagtaagctgacctggaaatgaatgaaactattactcctaagaattacattgtatagccccacagattaaatttaattaattaattcaaaacatgttaaacgttactttcatgtactatggaaaagtacaagtaggtttacattactgatttccagaagtaagtagtttcccctttcctagtcttctgtgtatgtgatgttgttaatttcttttattgcattataaaataaaaggattatgtatttttaactaaggtgagacattgatatatccttttgctacaagctatagctaatgtgctgagcttgtgccttggtgattgattgattgattgactgattgttttaactgattactgtagatcaacctgatgatttgtttgtttgaaattggcaggaaaaatgcagctttcaaatcattggggggagaaaaaggatgtctttcaggattattttaattaatttttttcataattgagacagaactgtttgttatgtaccataatgctaaataaaactgtggcacttttcaccataatttaatttagtggaaaaagaagacaatgctttccatattgtgataaggtaacatggggtttttctgggccagcctttagaacactgttagggtacatacgctaccttgatgaaagggaccttcgtgcaactgtagtcatcttaaaggcttctcatccactgtgcttcttaatgtgtaattaaagtgaggagaaattaaatactctgagggcgttttatataataaattcgtgaagaaatgtgtgctcttcagttctcaagttttattattatggtatttattaaagttctacaattgtaataacgtatccatatgacaagttttaaagtggtaattgaaataggttatcagatatagagttgttcacatcaagtagacttttaacagagtcagaatgaacctacccttaaaattttagagaaaaaaaatcgtcggttgcacagaatagctgctctagcttgcttaattatgccgggcatgttgtcactcctcttacttttgctgccttttcattactatttaatggaatgtccctgaacaataaggaagagcaaaacatagacattttgactacagtggatacttcctctaccccaaatgttatgttataaaagtactttttttgcccaggtactctattatatattttggttttctttgaattagacctcaatctccaggaagctctggagggaaaaaaaggaaccataaactaaagtaactggttttccaaataaatgtaaacttttttaaccttttattattatagaacatttcaaacatacataaaacatgaaaacagcctgcagccaaacttttctggaccttggcagctccagcaaatgagctggtcatcctaaccctggtttcctgagacaactacttttggggatgcttgcttgtatagggagatgatagatagatagatacatatcaaaaagaaacttgaaaaaggcttcgaacagaacttgccgatgttactcatccctcctcggtacagacattctgttagaacagatggttgtaatggggcagcatcactccctattcccattaaaaacatgaccattctgagatttcaggccccttcgaggaatttttctcaagaattccatacaaactgtcagaggaagaaatgtcgtcccaagactagtccctgtgtagtcttgatccctttacctgcttactgtaattttttttctctgactttccgccagtgtctaagggccatctgtacccctcccacccttccatgagccactgtataatccaaaaacacaccttccatttgctccctcacttgtctccttttacctcaacagtgttagtgtgtaaagaattgcctggggagggtagagggttttacaagtacagagtcccaagtcttttctcccctccccgttagtgggttggcatttattaataggcactgcaagattttgatgcaggtgtggggtagatatcactgtgaaaggctactaatgcatggtagtttcaccgaaagtacagtcttcaaggatccttataatctcctcattgccaaaatcagtaacatctataaccttgacaacaccctagcttgggctgttgcttctctggctacttgtttttccatcccagtttacccagattttagatggatactcctccaattctgcttaaagtccttacctgttcttgcccagttccctctagtcaacctcagtcactcccaaagattcttccccaatcccatatcttttgctcagacctctgtctctgggatttctttgttacctcatagtcagtagtcctaaaaacaaaattcttcatcttgcatctctatcgaccgaccattctttgtttctttttaagaaatgtaaccttcaccccaatcatcaaaatctctcattcctcaattgtcacaggttgtcacttctttccccctaaacctctcccatcattccttccttctttatactgcccttacaggtcctgatcctctgactcacccggacattcttagcagctgcctaatttcactccctgactctcatctccctcttccaatccttttcattgtgctagaacactatcttgctaattttaatatcctctgcattcagtgcctccacagattgccccctcactgacctttccaatttggccttgtgttacacactttcctcgctgcattcctacccagcatcttcacttgtcatatttctcaaatactcttcatgaccagatatttaaagtacctcatccatgaagacttcatcaacccccaaagtgcctccaatgcttccgtggtagcacagcataatggggtacatttcttagttgaacagtgaggagtcactgggattcttacagagtgtcttagggtctcctcttgatactctttccacatttcagttaaggaattttcttacatctttttttcttctaataacctttgcctggagtgtaagtaaattcatgatagagactgtcatttttaaaaaaaaaaacaaaccattttgcctttcacatgttattacctccatctttctgttatcttgtcagtgttgccacctaaatgattgaaaatgaccgagcatgcagtagaatgtagtgaagtttcctatttcatccattttttgcataagtgcattggtatctgtatatccatctgcccaagcaccagttgttgaaaagactattatttccccatgaatggtcctggtacccttgtcaaagaacagttgaccataaatataagactttctggattctcagtcttactccattgccctatatgtctgtcgttataccagcaccgcactgtcttgatggctgtagcttggtagtaagtttagatttgggatgtgcaagtcctccattttttttttttttttccccaaaatcattttgtctgttttgggtcccttgcattgcatatgaatttttatatgatcattgtgtcaattcctgcaaaacagctgggatcttgatagggatttagttgaattggtagataaatttgagaaataactgctattttaatggtgttaggttttctgttccatgactgtgggatgtctttgcatttgcttaggtctttatttcagtgatgttttagagatttcagtgtgcaagtcttgacgtctttaatttttttctaagtattttactgatgccactttaattatatgattattttctaatttttatttttgtattcatcactggtgttagaaataaaattaatttttgtatattgattttgtatattgtagcttttctaaaattctttttttgtcacttagtattttttgcatatgagatcatgcatctgtgaacagaaatacttttacttcttcctttccagtctagattcctattatttcattttcttgccttagtgtgctggctagcacctccagtacaatattggatagaagtgacaagagcagacatctttttcttgttcctgattttaaggggaaagcattcagtctttcaccattgagtatgatgttagctagctgtgggtttgcttcaagttgaggaaattcttttattaaacctagtttactgagtgttttttaatcaaaaaaaaaaaaaggaggggctgtgggttttgttaaatgcttcttctgtatcaagattttcatgttgttttgtcctttattaatatgttgtattaatggacttttgtatattgaattaactttgcattcctgggataatctcagttgtccatgctacataaaccttgttctatgctgctgga

SEQ ID NO: 644 - DNA, 8894 bp, Homo sapiens
  source 1..8894: mol_type = genomic DNA
agtcctcccgtcttgcgccgcggccgcgagatccgtgtgtctcccaagatggtggcgctgggctcggggtgactacaggagacgacggggccttttcccttcgccaggacccgacacaccaggcttcgctcgctcgcgcacccctccgccgcgtagccatccgccagcgcgggcgcccgccatccgccgcctacttacgcttcacctctgccgacccggcgcgctcggctgcgggcggcggcgcctccttcggctcctcctcggaatagctcgcggcctgtagcccctggcaggagggcccctcagccccccggtgtggacaggcagcggcggctggcgacgaacgccgggatttcggcggccccggcgctccctttcccggcctcgttttccggataaggaagcgcgggtcccgcatgagccccggcggtggcggcagcgaaagagaacgaggcggtggcgggcggaggcggcgggcgagggcgactacgaccagtgaggcggccgccgcagcccaggcgcgggggcgacgacaggttaaaaatctgtaagagcctgattttagaattcaccagctcctcagaagtttggcgaaatatgagttattaagcctacgctcagatcaaggtagcagctagactggtgtgacaacctgtttttaatcagtgactcaaagctgtgatcaccctgatgtcaccgaatggccacagcttgtaaaagccagctctgcctccttacagtatgacatctgatgctggagggtcgcactttcaaaaatgagtcagctggtacatggggttatcatcaatttttagctcttctgtctgggagatacaagtttggaagcaatcttggggtacttacccacaaggctggtggagaccagatcaggagaacctcagtctgacgacattgaagctagccgaatgaagcgagcagctgcaaagcatctaatagaacgctactaccaccagttaactgagggctgtggaaatgaagcctgcacgaatgagttttgtgcttcctgtccaacttttcttcgtatggataataatgcagcagctattaaagccctcgagctttataagattaatgcaaaactctgtgatcctcatccctccaagaaaggagcaagctcagcttaccttgagaactcgaaaggtgcccccaacaactcctgctctgagataaaaatgaacaagaaaggcgctagaattgattttaaagatgtgacttacttaacagaagagaaggtatatgaaattcttgaattatgtagagaaagagaggattattcccctttaatccgtgttattggaagagttttttctagtgctgaggcattggtacagagcttccggaaagttaaacaacacaccaaggaagaactgaaatctcttcaagcaaaagatgaagacaaagatgaagatgaaaaggaaaaagctgcatgttctgctgctgctatggaagaagactcagaagcatcttcctcaaggataggtgatagctcacagggagacaacaatttgcaaaaattaggccctgatgatgtgtctgtggatattgatgccattagaagggtctacaccagattgctctctaatgaaaaaattgaaactgcctttctcaatgcacttgtatatttgtcacctaacgtggaatgtgacttgacgtatcacaatgtatactctcgagatcctaattatctgaatttgttcattatcgtaatggagaatagaaatctccacagtcctgaatatctggaaatggctttgccattattttgcaaagcgatgagcaagctaccccttgcagcccaaggaaaactgatcagactgtggtctaaatacaatgcagaccagattcggagaatgatggagacatttcagcaacttattacttataaagtcataagcaatgaatttaacagtcgaaatctagtgaatgatgatgatgccattgttgctgcttcgaagtgcttgaaaatggtttactatgcaaatgtagtgggaggggaagtggacacaaatcacaatgaagaagatgatgaagagcccatccctgagtccagcgagctgacacttcaggaacttttgggagaagaaagaagaaacaagaaaggtcctcgagtggaccccctggaaactgaacttggtgttaaaaccctggattgtcgaaaaccacttatcccttttgaagagtttattaatgaaccactgaatgaggttctagaaatggataaagattatacttttttcaaagtagaaacagagaacaaattctcttttatgacatgtccctttatattgaatgctgtcacaaagaatttgggattatattatgacaatagaattcgcatgtacagtgaacgaagaatcactgttctctacagcttagttcaaggacagcagttgaatccatatttgagactcaaagttagacgtgaccatatcatagatgatgcacttgtccggctagagatgatcgctatggaaaatcctgcagacttgaagaagcagttgtatgtggaatttgaaggagaacaaggagttgatgagggaggtgtttccaaagaattttttcagctggttgtggaggaaatcttcaatccagatattggtatgttcacatacgatgaatctacaaaattgttttggtttaatccatcttcttttgaaactgagggtcagtttactctgattggcatagtactgggtctggctatttacaataactgtatactggatgtacattttcccatggttgtctacaggaagctaatggggaaaaaaggaacttttcgtgacttgggagactctcacccagttctatatcagagtttaaaagatttattggagtatgaagggaatgtggaagatgacatgatgatcactttccagatatcacagacagatctttttggtaacccaatgatgtatgatctaaaggaaaatggtgataaaattccaattacaaatgaaaacaggaaggaatttgtcaatctttattctgactacattctcaataaatcagtagaaaaacagttcaaggcttttcggagaggttttcatatggtgaccaatgaatctcccttaaagtacttattcagaccagaagaaattgaattgcttatatgtggaagccggaatctagatttccaagcactagaagaaactacagaatatgacggtggctataccagggactctgttctgattagggagttctgggaaatcgttcattcatttacagatgaacagaaaagactcttcttgcagtttacaacgggcacagacagagcacctgtgggaggactaggaaaattaaagatgattatagccaaaaatggcccagacacagaaaggttacctacatctcatacttgctttaatgtgcttttacttccggaatactcaagcaaagaaaaacttaaagagagattgttgaaggccatcacgtatgccaaaggatttggcatgctgtaaaacaaaacaaaacaaaataaaacaaaaaaaaggaaggaaaaaaaaagaaaaaatttaaaaaattttaaaaatataacgagggataaatttttggtggtgatagtgtcccagtacaaaaaggctgtaagatagtcaaccacagtagtcacctatgtctgtgcctcccttctttattggggacatgtgggctggaacagcagatttcagctacatatatgaacaaatcctttattattattataattatttttttgcgtgaaagtgttacatattctttcacttgtatgtacagagaggtttttctgaatatttattttaagggttaaatcacttttgcttgtgtttattactgcttgaggttgagccttttgagtatttaaaaaatatataccaacagaactactctcccaaggaaaatattgccaccatttgtagaccacgtaaccttcaagtatgtgctacttttttgtccctgtatctaactcaaatcaggaactgtattttttttaatgatttgcttttgaaacttgaagtcttgaaaacagtgtgatgcaattactgctgttctagcccccaaagagttttctgtgcaaaatcttgagaatcaatcaataaagaaagatggaaggaagggagaaattggaatgttttaactgcagccctcagaactttagtaacagcacaacaaattaaaaacaaaaacaactcatgccacagtatgtcgtcttcatgtgtcttgcaatgaactgtttcagtagccaatcctctttcttagtatatgaaaggacagggatttttgttcttgttgttctcgttgttgttttaagtttactggggaaagtgcatttggccaaatgaaatggtagtcaagcctattgcaacaaagttaggaagtttgttgtttgtttattataaacaaaaagcatgtgaaagtgcacttaagatagagtttttattaattacttacttattacctagattttaaatagacaatccaaagtctccccttcgtgttgccatcatcttgttgaatcagccattttatcgaggcacgtgatcagtgttgcaacataatgaaaaagatggctactgtgccttgtgttacttaatcatacagtaagctgacctggaaatgaatgaaactattactcctaagaattacattgtatagccccacagattaaatttaattaattaattcaaaacatgttaaacgttactttcatgtactatggaaaagtacaagtaggtttacattactgatttccagaagtaagtagtttcccctttcctagtcttctgtgtatgtgatgttgttaatttcttttattgcattataaaataaaaggattatgtatttttaactaaggtgagacattgatatatccttttgctacaagctatagctaatgtgctgagcttgtgccttggtgattgattgattgattgactgattgttttaactgattactgtagatcaacctgatgatttgtttgtttgaaattggcaggaaaaatgcagctttcaaatcattggggggagaaaaaggatgtctttcaggattattttaattaatttttttcataattgagacagaactgtttgttatgtaccataatgctaaataaaactgtggcacttttcaccataatttaatttagtggaaaaagaagacaatgctttccatattgtgataaggtaacatggggtttttctgggccagcctttagaacactgttagggtacatacgctaccttgatgaaagggaccttcgtgcaactgtagtcatcttaaaggcttctcatccactgtgcttcttaatgtgtaattaaagtgaggagaaattaaatactctgagggcgttttatataataaattcgtgaagaaatgtgtgctcttcagttctcaagttttattattatggtatttattaaagttctacaattgtaataacgtatccatatgacaagttttaaagtggtaattgaaataggttatcagatatagagttgttcacatcaagtagacttttaacagagtcagaatgaacctacccttaaaattttagagaaaaaaaatcgtcggttgcacagaatagctgctctagcttgcttaattatgccgggcatgttgtcactcctcttacttttgctgccttttcattactatttaatggaatgtccctgaacaataaggaagagcaaaacatagacattttgactacagtggatacttcctctaccccaaatgttatgttataaaagtactttttttgcccaggtactctattatatattttggttttctttgaattagacctcaatctccaggaagctctggagggaaaaaaaggaaccataaactaaagtaactggttttccaaataaatgtaaacttttttaaccttttattattatagaacatttcaaacatacataaaacatgaaaacagcctgcagccaaacttttctggaccttggcagctccagcaaatgagctggtcatcctaaccctggtttcctgagacaactacttttggggatgcttgcttgtatagggagatgatagatagatagatacatatcaaaaagaaacttgaaaaaggcttcgaacagaacttgccgatgttactcatccctcctcggtacagacattctgttagaacagatggttgtaatggggcagcatcactccctattcccattaaaaacatgaccattctgagatttcaggccccttcgaggaatttttctcaagaattccatacaaactgtcagaggaagaaatgtcgtcccaagactagtccctgtgtagtcttgatccctttacctgcttactgtaattttttttctctgactttccgccagtgtctaagggccatctgtacccctcccacccttccatgagccactgtataatccaaaaacacaccttccatttgctccctcacttgtctccttttacctcaacagtgttagtgtgtaaagaattgcctggggagggtagagggttttacaagtacagagtcccaagtcttttctcccctccccgttagtgggttggcatttattaataggcactgcaagattttgatgcaggtgtggggtagatatcactgtgaaaggctactaatgcatggtagtttcaccgaaagtacagtcttcaaggatccttataatctcctcattgccaaaatcagtaacatctataaccttgacaacaccctagcttgggctgttgcttctctggctacttgtttttccatcccagtttacccagattttagatggatactcctccaattctgcttaaagtccttacctgttcttgcccagttccctctagtcaacctcagtcactcccaaagattcttccccaatcccatatcttttgctcagacctctgtctctgggatttctttgttacctcatagtcagtagtcctaaaaacaaaattcttcatcttgcatctctatcgaccgaccattctttgtttctttttaagaaatgtaaccttcaccccaatcatcaaaatctctcattcctcaattgtcacaggttgtcacttctttccccctaaacctctcccatcattccttccttctttatactgcccttacaggtcctgatcctctgactcacccggacattcttagcagctgcctaatttcactccctgactctcatctccctcttccaatccttttcattgtgctagaacactatcttgctaattttaatatcctctgcattcagtgcctccacagattgccccctcactgacctttccaatttggccttgtgttacacactttcctcgctgcattcctacccagcatcttcacttgtcatatttctcaaatactcttcatgaccagatatttaaagtacctcatccatgaagacttcatcaacccccaaagtgcctccaatgcttccgtggtagcacagcataatggggtacatttcttagttgaacagtgaggagtcactgggattcttacagagtgtcttagggtctcctcttgatactctttccacatttcagttaaggaattttcttacatctttttttcttctaataacctttgcctggagtgtaagtaaattcatgatagagactgtcatttttaaaaaaaaaaacaaaccattttgcctttcacatgttattacctccatctttctgttatcttgtcagtgttgccacctaaatgattgaaaatgaccgagcatgcagtagaatgtagtgaagtttcctatttcatccattttttgcataagtgcattggtatctgtatatccatctgcccaagcaccagttgttgaaaagactattatttccccatgaatggtcctggtacccttgtcaaagaacagttgaccataaatataagactttctggattctcagtcttactccattgccctatatgtctgtcgttataccagcaccgcactgtcttgatggctgtagcttggtagtaagtttagatttgggatgtgcaagtcctccattttttttttttttttccccaaaatcattttgtctgttttgggtcccttgcattgcatatgaatttttatatgatcattgtgtcaattcctgcaaaacagctgggatcttgatagggatttagttgaattggtagataaatttgagaaataactgctattttaatggtgttaggttttctgttccatgactgtgggatgtctttgcatttgcttaggtctttatttcagtgatgttttagagatttcagtgtgcaagtcttgacgtctttaatttttttctaagtattttactgatgccactttaattatatgattattttctaatttttatttttgtattcatcactggtgttagaaataaaattaatttttgtatattgattttgtatattgtagcttttctaaaattctttttttgtcacttagtattttttgcatatgagatcatgcatctgtgaacagaaatacttttacttcttcctttccagtctagattcctattatttcattttcttgccttagtgtgctggctagcacctccagtacaatattggatagaagtgacaagagcagacatctttttcttgttcctgattttaaggggaaagcattcagtctttcaccattgagtatgatgttagctagctgtgggtttgcttcaagttgaggaaattcttttattaaacctagtttactgagtgttttttaatcaaaaaaaaaaaaaggaggggctgtgggttttgttaaatgcttcttctgtatcaagattttcatgttgttttgtcctttattaatatgttgtattaatggacttttgtatattgaattaactttgcattcctgggataatctcagttgtccatgctacataaaccttgttctatgctgctgga

SEQ ID NO: 645 - DNA, 8768 bp, Homo sapiens
  source 1..8768: mol_type = genomic DNA
agtcctcccgtcttgcgccgcggccgcgagatccgtgtgtctcccaagatggtggcgctgggctcggggtgactacaggagacgacggggccttttcccttcgccaggacccgacacaccaggcttcgctcgctcgcgcacccctccgccgcgtagccatccgccagcgcgggcgcccgccatccgccgcctacttacgcttcacctctgccgacccggcgcgctcggctgcgggcggcggcgcctccttcggctcctcctcggaatagctcgcggcctgtagcccctggcaggagggcccctcagccccccggtgtggacaggcagcggcggctggcgacgaacgccgggatttcggcggccccggcgctccctttcccggcctcgttttccggataaggaagcgcgggtcccgcatgagccccggcggtggcggcagcgaaagagaacgaggcggtggcgggcggaggcggcgggcgagggcgactacgaccagtgaggcggccgccgcagcccaggcgcgggggcgacgacaggttaaaaatctgtaagagcctgattttagaattcaccagctcctcagaagtttggcgaaatatgagttattaagcctacgctcagatcaaggtagcagctagactggtgtgacaacctgtttttaatcagtgactcaaagctgtgatcaccctgatgtcaccgaatggccacagcttgtaaaagtgccagcaggtttattttttgttttgcaagccagctctgcctccttacagtatgacatctgatgctggagggtcgcactttcaaaaatgagtcagctggtacatggggttatcatcaatttttagctcttctgtctgggagatacaagtttggaagcaatcttggggtacttacccacaaggctggtggagaccagatcaggagaacctcagtctgacgacattgaagctagccgaatgaagcgagcagctgcaaagcatctaatagaacgctactaccaccagttaactgagggctgtggaaatgaagcctgcacgaatgagttttgtgcttcctgtccaacttttcttcgtatggataataatgcagcagctattaaagccctcgagctttataagattaatgcaaaactctgtgatcctcatccctccaagaaaggagcaagctcagcttaccttgagaactcgaaaggtgcccccaacaactcctgctctgagataaaaatgaacaagaaaggcgctagaattgattttaaagatgtgacttacttaacagaagagaaggtatatgaaattcttgaattatgtagagaaagagaggattattcccctttaatccgtgttattggaagagttttttctagtgctgaggcattggtacagagcttccggaaagttaaacaacacaccaaggaagaactgaaatctcttcaagcaaaagatgaagacaaagatgaagatgaaaaggaaaaagctgcatgttctgctgctgctatggaagaagactcagaagcatcttcctcaaggataggtgatagctcacagggagacaacaatttgcaaaaattaggccctgatgatgtgtctgtggatattgatgccattagaagggtctacaccagattgctctctaatgaaaaaattgaaactgcctttctcaatgcacttgtatatttgtcacctaacgtggaatgtgacttgacgtatcacaatgtatactctcgagatcctaattatctgaatttgttcattatcgtaatggagaatagaaatctccacagtcctgaatatctggaaatggctttgccattattttgcaaagcgatgagcaagctaccccttgcagcccaaggaaaactgatcagactgtggtctaaatacaatgcagaccagattcggagaatgatggagacatttcagcaacttattacttataaagtcataagcaatgaatttaacagtcgaaatctagtgaatgatgatgatgccattgttgctgcttcgaagtgcttgaaaatggtttactatgcaaatgtagtgggaggggaagtggacacaaatcacaatgaagaagatgatgaagagcccatccctgagtccagcgagctgacacttcaggaacttttgggagaagaaagaagaaacaagaaaggtcctcgagtggaccccctggaaactgaacttggtgttaaaaccctggattgtcgaaaaccacttatcccttttgaagagtttattaatgaaccactgaatgaggttctagaaatggataaagattatacttttttcaaagtagaaacagagaacaaattctcttttatgacatgtccctttatattgaatgctgtcacaaagaatttgggattatattatgacaatagaattcgcatgtacagtgaacgaagaatcactgttctctacagcttagttcaaggacagcagttgaatccatatttgagactcaaagttagacgtgaccatatcatagatgatgcacttgtccggctagagatgatcgctatggaaaatcctgcagacttgaagaagcagttgtatgtggaatttgaaggagaacaaggagttgatgagggaggtgtttccaaagaattttttcagctggttgtggaggaaatcttcaatccagatattggtatgttcacatacgatgaatctacaaaattgttttggtttaatccatcttcttttgaaactgagggtcagtttactctgattggcatagtactgggtctggctatttacaataactgtatactggatgtacattttcccatggttgtctacaggaagctaatggggaaaaaaggaacttttcgtgacttgggagactctcacccagttctatatcagagtttaaaagatttattggagtatgaagggaatgtggaagatgacatgatgatcactttccagatatcacagacagatctttttggtaacccaatgatgtatgatctaaaggaaaatggtgataaaattccaattacaaatgaaaacaggaagaatctagatttccaagcactagaagaaactacagaatatgacggtggctataccagggactctgttctgattagggagttctgggaaatcgttcattcatttacagatgaacagaaaagactcttcttgcagtttacaacgggcacagacagagcacctgtgggaggactaggaaaattaaagatgattatagccaaaaatggcccagacacagaaaggttacctacatctcatacttgctttaatgtgcttttacttccggaatactcaagcaaagaaaaacttaaagagagattgttgaaggccatcacgtatgccaaaggatttggcatgctgtaaaacaaaacaaaacaaaataaaacaaaaaaaaggaaggaaaaaaaaagaaaaaatttaaaaaattttaaaaatataacgagggataaatttttggtggtgatagtgtcccagtacaaaaaggctgtaagatagtcaaccacagtagtcacctatgtctgtgcctcccttctttattggggacatgtgggctggaacagcagatttcagctacatatatgaacaaatcctttattattattataattatttttttgcgtgaaagtgttacatattctttcacttgtatgtacagagaggtttttctgaatatttattttaagggttaaatcacttttgcttgtgtttattactgcttgaggttgagccttttgagtatttaaaaaatatataccaacagaactactctcccaaggaaaatattgccaccatttgtagaccacgtaaccttcaagtatgtgctacttttttgtccctgtatctaactcaaatcaggaactgtattttttttaatgatttgcttttgaaacttgaagtcttgaaaacagtgtgatgcaattactgctgttctagcccccaaagagttttctgtgcaaaatcttgagaatcaatcaataaagaaagatggaaggaagggagaaattggaatgttttaactgcagccctcagaactttagtaacagcacaacaaattaaaaacaaaaacaactcatgccacagtatgtcgtcttcatgtgtcttgcaatgaactgtttcagtagccaatcctctttcttagtatatgaaaggacagggatttttgttcttgttgttctcgttgttgttttaagtttactggggaaagtgcatttggccaaatgaaatggtagtcaagcctattgcaacaaagttaggaagtttgttgtttgtttattataaacaaaaagcatgtgaaagtgcacttaagatagagtttttattaattacttacttattacctagattttaaatagacaatccaaagtctccccttcgtgttgccatcatcttgttgaatcagccattttatcgaggcacgtgatcagtgttgcaacataatgaaaaagatggctactgtgccttgtgttacttaatcatacagtaagctgacctggaaatgaatgaaactattactcctaagaattacattgtatagccccacagattaaatttaattaattaattcaaaacatgttaaacgttactttcatgtactatggaaaagtacaagtaggtttacattactgatttccagaagtaagtagtttcccctttcctagtcttctgtgtatgtgatgttgttaatttcttttattgcattataaaataaaaggattatgtatttttaactaaggtgagacattgatatatccttttgctacaagctatagctaatgtgctgagcttgtgccttggtgattgattgattgattgactgattgttttaactgattactgtagatcaacctgatgatttgtttgtttgaaattggcaggaaaaatgcagctttcaaatcattggggggagaaaaaggatgtctttcaggattattttaattaatttttttcataattgagacagaactgtttgttatgtaccataatgctaaataaaactgtggcacttttcaccataatttaatttagtggaaaaagaagacaatgctttccatattgtgataaggtaacatggggtttttctgggccagcctttagaacactgttagggtacatacgctaccttgatgaaagggaccttcgtgcaactgtagtcatcttaaaggcttctcatccactgtgcttcttaatgtgtaattaaagtgaggagaaattaaatactctgagggcgttttatataataaattcgtgaagaaatgtgtgctcttcagttctcaagttttattattatggtatttattaaagttctacaattgtaataacgtatccatatgacaagttttaaagtggtaattgaaataggttatcagatatagagttgttcacatcaagtagacttttaacagagtcagaatgaacctacccttaaaattttagagaaaaaaaatcgtcggttgcacagaatagctgctctagcttgcttaattatgccgggcatgttgtcactcctcttacttttgctgccttttcattactatttaatggaatgtccctgaacaataaggaagagcaaaacatagacattttgactacagtggatacttcctctaccccaaatgttatgttataaaagtactttttttgcccaggtactctattatatattttggttttctttgaattagacctcaatctccaggaagctctggagggaaaaaaaggaaccataaactaaagtaactggttttccaaataaatgtaaacttttttaaccttttattattatagaacatttcaaacatacataaaacatgaaaacagcctgcagccaaacttttctggaccttggcagctccagcaaatgagctggtcatcctaaccctggtttcctgagacaactacttttggggatgcttgcttgtatagggagatgatagatagatagatacatatcaaaaagaaacttgaaaaaggcttcgaacagaacttgccgatgttactcatccctcctcggtacagacattctgttagaacagatggttgtaatggggcagcatcactccctattcccattaaaaacatgaccattctgagatttcaggccccttcgaggaatttttctcaagaattccatacaaactgtcagaggaagaaatgtcgtcccaagactagtccctgtgtagtcttgatccctttacctgcttactgtaattttttttctctgactttccgccagtgtctaagggccatctgtacccctcccacccttccatgagccactgtataatccaaaaacacaccttccatttgctccctcacttgtctccttttacctcaacagtgttagtgtgtaaagaattgcctggggagggtagagggttttacaagtacagagtcccaagtcttttctcccctccccgttagtgggttggcatttattaataggcactgcaagattttgatgcaggtgtggggtagatatcactgtgaaaggctactaatgcatggtagtttcaccgaaagtacagtcttcaaggatccttataatctcctcattgccaaaatcagtaacatctataaccttgacaacaccctagcttgggctgttgcttctctggctacttgtttttccatcccagtttacccagattttagatggatactcctccaattctgcttaaagtccttacctgttcttgcccagttccctctagtcaacctcagtcactcccaaagattcttccccaatcccatatcttttgctcagacctctgtctctgggatttctttgttacctcatagtcagtagtcctaaaaacaaaattcttcatcttgcatctctatcgaccgaccattctttgtttctttttaagaaatgtaaccttcaccccaatcatcaaaatctctcattcctcaattgtcacaggttgtcacttctttccccctaaacctctcccatcattccttccttctttatactgcccttacaggtcctgatcctctgactcacccggacattcttagcagctgcctaatttcactccctgactctcatctccctcttccaatccttttcattgtgctagaacactatcttgctaattttaatatcctctgcattcagtgcctccacagattgccccctcactgacctttccaatttggccttgtgttacacactttcctcgctgcattcctacccagcatcttcacttgtcatatttctcaaatactcttcatgaccagatatttaaagtacctcatccatgaagacttcatcaacccccaaagtgcctccaatgcttccgtggtagcacagcataatggggtacatttcttagttgaacagtgaggagtcactgggattcttacagagtgtcttagggtctcctcttgatactctttccacatttcagttaaggaattttcttacatctttttttcttctaataacctttgcctggagtgtaagtaaattcatgatagagactgtcatttttaaaaaaaaaaacaaaccattttgcctttcacatgttattacctccatctttctgttatcttgtcagtgttgccacctaaatgattgaaaatgaccgagcatgcagtagaatgtagtgaagtttcctatttcatccattttttgcataagtgcattggtatctgtatatccatctgcccaagcaccagttgttgaaaagactattatttccccatgaatggtcctggtacccttgtcaaagaacagttgaccataaatataagactttctggattctcagtcttactccattgccctatatgtctgtcgttataccagcaccgcactgtcttgatggctgtagcttggtagtaagtttagatttgggatgtgcaagtcctccattttttttttttttttccccaaaatcattttgtctgttttgggtcccttgcattgcatatgaatttttatatgatcattgtgtcaattcctgcaaaacagctgggatcttgatagggatttagttgaattggtagataaatttgagaaataactgctattttaatggtgttaggttttctgttccatgactgtgggatgtctttgcatttgcttaggtctttatttcagtgatgttttagagatttcagtgtgcaagtcttgacgtctttaatttttttctaagtattttactgatgccactttaattatatgattattttctaatttttatttttgtattcatcactggtgttagaaataaaattaatttttgtatattgattttgtatattgtagcttttctaaaattctttttttgtcacttagtattttttgcatatgagatcatgcatctgtgaacagaaatacttttacttcttcctttccagtctagattcctattatttcattttcttgccttagtgtgctggctagcacctccagtacaatattggatagaagtgacaagagcagacatctttttcttgttcctgattttaaggggaaagcattcagtctttcaccattgagtatgatgttagctagctgtgggtttgcttcaagttgaggaaattcttttattaaacctagtttactgagtgttttttaatcaaaaaaaaaaaaaggaggggctgtgggttttgttaaatgcttcttctgtatcaagattttcatgttgttttgtcctttattaatatgttgtattaatggacttttgtatattgaattaactttgcattcctgggataatctcagttgtccatgctacataaaccttgttctatgctgctgga

SEQ ID NO: 646 - DNA, 8924 bp, Homo sapiens
  source 1..8924: mol_type = genomic DNA
agtcctcccgtcttgcgccgcggccgcgagatccgtgtgtctcccaagatggtggcgctgggctcggggtgactacaggagacgacggggccttttcccttcgccaggacccgacacaccaggcttcgctcgctcgcgcacccctccgccgcgtagccatccgccagcgcgggcgcccgccatccgccgcctacttacgcttcacctctgccgacccggcgcgctcggctgcgggcggcggcgcctccttcggctcctcctcggaatagctcgcggcctgtagcccctggcaggagggcccctcagccccccggtgtggacaggcagcggcggctggcgacgaacgccgggatttcggcggccccggcgctccctttcccggcctcgttttccggataaggaagcgcgggtcccgcatgagccccggcggtggcggcagcgaaagagaacgaggcggtggcgggcggaggcggcgggcgagggcgactacgaccagtgaggcggccgccgcagcccaggcgcgggggcgacgacaggttaaaaatctgtaagagcctgattttagaattcaccagctcctcagaagtttggcgaaatatgagttattaagcctacgctcagatcaaggtagcagctagactggtgtgacaacctgtttttaatcagtgactcaaagctgtgatcaccctgatgtcaccgaatggccacagcttgtaaaagtgccagcaggtttattttttgttttgcaagccagctctgcctccttacagtatgacatctgatgctggagggtcgcactttcaaaaatgagtcagctggtacatggggttatcatcaatttttagctcttctgtctgggagatacaagtttggaagcaatcttggggtacttacccacaaggctggtggagaccagatcaggagaacctcagtctgacgacattgaagctagccgaatgaagcgagcagctgcaaagcatctaatagaacgctactaccaccagttaactgagggctgtggaaatgaagcctgcacgaatgagttttgtgcttcctgtccaacttttcttcgtatggataataatgcagcagctattaaagccctcgagctttataagattaatgcaaaactctgtgatcctcatccctccaagaaaggagcaagctcagcttaccttgagaactcgaaaggtgcccccaacaactcctgctctgagataaaaatgaacaagaaaggcgctagaattgattttaaagatgtgacttacttaacagaagagaaggtatatgaaattcttgaattatgtagagaaagagaggattattcccctttaatccgtgttattggaagagttttttctagtgctgaggcattggtacagagcttccggaaagttaaacaacacaccaaggaagaactgaaatctcttcaagcaaaagatgaagacaaagatgaagatgaaaaggaaaaagctgcatgttctgctgctgctatggaagaagactcagaagcatcttcctcaaggataggtgatagctcacagggagacaacaatttgcaaaaattaggccctgatgatgtgtctgtggatattgatgccattagaagggtctacaccagattgctctctaatgaaaaaattgaaactgcctttctcaatgcacttgtatatttgtcacctaacgtggaatgtgacttgacgtatcacaatgtatactctcgagatcctaattatctgaatttgttcattatcgtaatggagaatagaaatctccacagtcctgaatatctggaaatggctttgccattattttgcaaagcgatgagcaagctaccccttgcagcccaaggaaaactgatcagactgtggtctaaatacaatgcagaccagattcggagaatgatggagacatttcagcaacttattacttataaagtcataagcaatgaatttaacagtcgaaatctagtgaatgatgatgatgccattgttgctgcttcgaagtgcttgaaaatggtttactatgcaaatgtagtgggaggggaagtggacacaaatcacaatgaagaagatgatgaagagcccatccctgagtccagcgagctgacacttcaggaacttttgggagaagaaagaagaaacaagaaaggtcctcgagtggaccccctggaaactgaacttggtgttaaaaccctggattgtcgaaaaccacttatcccttttgaagagtttattaatgaaccactgaatgaggttctagaaatggataaagattatacttttttcaaagtagaaacagagaacaaattctcttttatgacatgtccctttatattgaatgctgtcacaaagaatttgggattatattatgacaatagaattcgcatgtacagtgaacgaagaatcactgttctctacagcttagttcaaggacagcagttgaatccatatttgagactcaaagttagacgtgaccatatcatagatgatgcacttgtccggctagagatgatcgctatggaaaatcctgcagacttgaagaagcagttgtatgtggaatttgaaggagaacaaggagttgatgagggaggtgtttccaaagaattttttcagctggttgtggaggaaatcttcaatccagatattggtatgttcacatacgatgaatctacaaaattgttttggtttaatccatcttcttttgaaactgagggtcagtttactctgattggcatagtactgggtctggctatttacaataactgtatactggatgtacattttcccatggttgtctacaggaagctaatggggaaaaaaggaacttttcgtgacttgggagactctcacccagttctatatcagagtttaaaagatttattggagtatgaagggaatgtggaagatgacatgatgatcactttccagatatcacagacagatctttttggtaacccaatgatgtatgatctaaaggaaaatggtgataaaattccaattacaaatgaaaacaggaaggaatttgtcaatctttattctgactacattctcaataaatcagtagaaaaacagttcaaggcttttcggagaggttttcatatggtgaccaatgaatctcccttaaagtacttattcagaccagaagaaattgaattgcttatatgtggaagccggaatctagatttccaagcactagaagaaactacagaatatgacggtggctataccagggactctgttctgattagggagttctgggaaatcgttcattcatttacagatgaacagaaaagactcttcttgcagtttacaacgggcacagacagagcacctgtgggaggactaggaaaattaaagatgattatagccaaaaatggcccagacacagaaaggttacctacatctcatacttgctttaatgtgcttttacttccggaatactcaagcaaagaaaaacttaaagagagattgttgaaggccatcacgtatgccaaaggatttggcatgctgtaaaacaaaacaaaacaaaataaaacaaaaaaaaggaaggaaaaaaaaagaaaaaatttaaaaaattttaaaaatataacgagggataaatttttggtggtgatagtgtcccagtacaaaaaggctgtaagatagtcaaccacagtagtcacctatgtctgtgcctcccttctttattggggacatgtgggctggaacagcagatttcagctacatatatgaacaaatcctttattattattataattatttttttgcgtgaaagtgttacatattctttcacttgtatgtacagagaggtttttctgaatatttattttaagggttaaatcacttttgcttgtgtttattactgcttgaggttgagccttttgagtatttaaaaaatatataccaacagaactactctcccaaggaaaatattgccaccatttgtagaccacgtaaccttcaagtatgtgctacttttttgtccctgtatctaactcaaatcaggaactgtattttttttaatgatttgcttttgaaacttgaagtcttgaaaacagtgtgatgcaattactgctgttctagcccccaaagagttttctgtgcaaaatcttgagaatcaatcaataaagaaagatggaaggaagggagaaattggaatgttttaactgcagccctcagaactttagtaacagcacaacaaattaaaaacaaaaacaactcatgccacagtatgtcgtcttcatgtgtcttgcaatgaactgtttcagtagccaatcctctttcttagtatatgaaaggacagggatttttgttcttgttgttctcgttgttgttttaagtttactggggaaagtgcatttggccaaatgaaatggtagtcaagcctattgcaacaaagttaggaagtttgttgtttgtttattataaacaaaaagcatgtgaaagtgcacttaagatagagtttttattaattacttacttattacctagattttaaatagacaatccaaagtctccccttcgtgttgccatcatcttgttgaatcagccattttatcgaggcacgtgatcagtgttgcaacataatgaaaaagatggctactgtgccttgtgttacttaatcatacagtaagctgacctggaaatgaatgaaactattactcctaagaattacattgtatagccccacagattaaatttaattaattaattcaaaacatgttaaacgttactttcatgtactatggaaaagtacaagtaggtttacattactgatttccagaagtaagtagtttcccctttcctagtcttctgtgtatgtgatgttgttaatttcttttattgcattataaaataaaaggattatgtatttttaactaaggtgagacattgatatatccttttgctacaagctatagctaatgtgctgagcttgtgccttggtgattgattgattgattgactgattgttttaactgattactgtagatcaacctgatgatttgtttgtttgaaattggcaggaaaaatgcagctttcaaatcattggggggagaaaaaggatgtctttcaggattattttaattaatttttttcataattgagacagaactgtttgttatgtaccataatgctaaataaaactgtggcacttttcaccataatttaatttagtggaaaaagaagacaatgctttccatattgtgataaggtaacatggggtttttctgggccagcctttagaacactgttagggtacatacgctaccttgatgaaagggaccttcgtgcaactgtagtcatcttaaaggcttctcatccactgtgcttcttaatgtgtaattaaagtgaggagaaattaaatactctgagggcgttttatataataaattcgtgaagaaatgtgtgctcttcagttctcaagttttattattatggtatttattaaagttctacaattgtaataacgtatccatatgacaagttttaaagtggtaattgaaataggttatcagatatagagttgttcacatcaagtagacttttaacagagtcagaatgaacctacccttaaaattttagagaaaaaaaatcgtcggttgcacagaatagctgctctagcttgcttaattatgccgggcatgttgtcactcctcttacttttgctgccttttcattactatttaatggaatgtccctgaacaataaggaagagcaaaacatagacattttgactacagtggatacttcctctaccccaaatgttatgttataaaagtactttttttgcccaggtactctattatatattttggttttctttgaattagacctcaatctccaggaagctctggagggaaaaaaaggaaccataaactaaagtaactggttttccaaataaatgtaaacttttttaaccttttattattatagaacatttcaaacatacataaaacatgaaaacagcctgcagccaaacttttctggaccttggcagctccagcaaatgagctggtcatcctaaccctggtttcctgagacaactacttttggggatgcttgcttgtatagggagatgatagatagatagatacatatcaaaaagaaacttgaaaaaggcttcgaacagaacttgccgatgttactcatccctcctcggtacagacattctgttagaacagatggttgtaatggggcagcatcactccctattcccattaaaaacatgaccattctgagatttcaggccccttcgaggaatttttctcaagaattccatacaaactgtcagaggaagaaatgtcgtcccaagactagtccctgtgtagtcttgatccctttacctgcttactgtaattttttttctctgactttccgccagtgtctaagggccatctgtacccctcccacccttccatgagccactgtataatccaaaaacacaccttccatttgctccctcacttgtctccttttacctcaacagtgttagtgtgtaaagaattgcctggggagggtagagggttttacaagtacagagtcccaagtcttttctcccctccccgttagtgggttggcatttattaataggcactgcaagattttgatgcaggtgtggggtagatatcactgtgaaaggctactaatgcatggtagtttcaccgaaagtacagtcttcaaggatccttataatctcctcattgccaaaatcagtaacatctataaccttgacaacaccctagcttgggctgttgcttctctggctacttgtttttccatcccagtttacccagattttagatggatactcctccaattctgcttaaagtccttacctgttcttgcccagttccctctagtcaacctcagtcactcccaaagattcttccccaatcccatatcttttgctcagacctctgtctctgggatttctttgttacctcatagtcagtagtcctaaaaacaaaattcttcatcttgcatctctatcgaccgaccattctttgtttctttttaagaaatgtaaccttcaccccaatcatcaaaatctctcattcctcaattgtcacaggttgtcacttctttccccctaaacctctcccatcattccttccttctttatactgcccttacaggtcctgatcctctgactcacccggacattcttagcagctgcctaatttcactccctgactctcatctccctcttccaatccttttcattgtgctagaacactatcttgctaattttaatatcctctgcattcagtgcctccacagattgccccctcactgacctttccaatttggccttgtgttacacactttcctcgctgcattcctacccagcatcttcacttgtcatatttctcaaatactcttcatgaccagatatttaaagtacctcatccatgaagacttcatcaacccccaaagtgcctccaatgcttccgtggtagcacagcataatggggtacatttcttagttgaacagtgaggagtcactgggattcttacagagtgtcttagggtctcctcttgatactctttccacatttcagttaaggaattttcttacatctttttttcttctaataacctttgcctggagtgtaagtaaattcatgatagagactgtcatttttaaaaaaaaaaacaaaccattttgcctttcacatgttattacctccatctttctgttatcttgtcagtgttgccacctaaatgattgaaaatgaccgagcatgcagtagaatgtagtgaagtttcctatttcatccattttttgcataagtgcattggtatctgtatatccatctgcccaagcaccagttgttgaaaagactattatttccccatgaatggtcctggtacccttgtcaaagaacagttgaccataaatataagactttctggattctcagtcttactccattgccctatatgtctgtcgttataccagcaccgcactgtcttgatggctgtagcttggtagtaagtttagatttgggatgtgcaagtcctccattttttttttttttttccccaaaatcattttgtctgttttgggtcccttgcattgcatatgaatttttatatgatcattgtgtcaattcctgcaaaacagctgggatcttgatagggatttagttgaattggtagataaatttgagaaataactgctattttaatggtgttaggttttctgttccatgactgtgggatgtctttgcatttgcttaggtctttatttcagtgatgttttagagatttcagtgtgcaagtcttgacgtctttaatttttttctaagtattttactgatgccactttaattatatgattattttctaatttttatttttgtattcatcactggtgttagaaataaaattaatttttgtatattgattttgtatattgtagcttttctaaaattctttttttgtcacttagtattttttgcatatgagatcatgcatctgtgaacagaaatacttttacttcttcctttccagtctagattcctattatttcattttcttgccttagtgtgctggctagcacctccagtacaatattggatagaagtgacaagagcagacatctttttcttgttcctgattttaaggggaaagcattcagtctttcaccattgagtatgatgttagctagctgtgggtttgcttcaagttgaggaaattcttttattaaacctagtttactgagtgttttttaatcaaaaaaaaaaaaaggaggggctgtgggttttgttaaatgcttcttctgtatcaagattttcatgttgttttgtcctttattaatatgttgtattaatggacttttgtatattgaattaactttgcattcctgggataatctcagttgtccatgctacataaaccttgttctatgctgctgga

SEQ ID NO: 647 - DNA, 8864 bp, Homo sapiens
  source 1..8864: mol_type = genomic DNA
agtcctcccgtcttgcgccgcggccgcgagatccgtgtgtctcccaagatggtggcgctgggctcggggtgactacaggagacgacggggccttttcccttcgccaggacccgacacaccaggcttcgctcgctcgcgcacccctccgccgcgtagccatccgccagcgcgggcgcccgccatccgccgcctacttacgcttcacctctgccgacccggcgcgctcggctgcgggcggcggcgcctccttcggctcctcctcggaatagctcgcggcctgtagcccctggcaggagggcccctcagccccccggtgtggacaggcagcggcggctggcgacgaacgccgggatttcggcggccccggcgctccctttcccggcctcgttttccggataaggaagcgcgggtcccgcatgagccccggcggtggcggcagcgaaagagaacgaggcggtggcgggcggaggcggcgggcgagggcgactacgaccagtgaggcggccgccgcagcccaggcgcgggggcgacgacaggttaaaaatctgtaagagcctgattttagaattcaccagctcctcagaagtttggcgaaatatgagttattaagcctacgctcagatcaaggtagcagctagactggtgtgacaacctgtttttaatcagtgactcaaagctgtgatcaccctgatgtcaccgaatggccacagcttgtaaaagagagttacagtggaggtaaaaggagtggcttgcaggatggagaagctgcaccagtgttattggaactcttctgtctgggagatacaagtttggaagcaatcttggggtacttacccacaaggctggtggagaccagatcaggagaacctcagtctgacgacattgaagctagccgaatgaagcgagcagctgcaaagcatctaatagaacgctactaccaccagttaactgagggctgtggaaatgaagcctgcacgaatgagttttgtgcttcctgtccaacttttcttcgtatggataataatgcagcagctattaaagccctcgagctttataagattaatgcaaaactctgtgatcctcatccctccaagaaaggagcaagctcagcttaccttgagaactcgaaaggtgcccccaacaactcctgctctgagataaaaatgaacaagaaaggcgctagaattgattttaaagatgtgacttacttaacagaagagaaggtatatgaaattcttgaattatgtagagaaagagaggattattcccctttaatccgtgttattggaagagttttttctagtgctgaggcattggtacagagcttccggaaagttaaacaacacaccaaggaagaactgaaatctcttcaagcaaaagatgaagacaaagatgaagatgaaaaggaaaaagctgcatgttctgctgctgctatggaagaagactcagaagcatcttcctcaaggataggtgatagctcacagggagacaacaatttgcaaaaattaggccctgatgatgtgtctgtggatattgatgccattagaagggtctacaccagattgctctctaatgaaaaaattgaaactgcctttctcaatgcacttgtatatttgtcacctaacgtggaatgtgacttgacgtatcacaatgtatactctcgagatcctaattatctgaatttgttcattatcgtaatggagaatagaaatctccacagtcctgaatatctggaaatggctttgccattattttgcaaagcgatgagcaagctaccccttgcagcccaaggaaaactgatcagactgtggtctaaatacaatgcagaccagattcggagaatgatggagacatttcagcaacttattacttataaagtcataagcaatgaatttaacagtcgaaatctagtgaatgatgatgatgccattgttgctgcttcgaagtgcttgaaaatggtttactatgcaaatgtagtgggaggggaagtggacacaaatcacaatgaagaagatgatgaagagcccatccctgagtccagcgagctgacacttcaggaacttttgggagaagaaagaagaaacaagaaaggtcctcgagtggaccccctggaaactgaacttggtgttaaaaccctggattgtcgaaaaccacttatcccttttgaagagtttattaatgaaccactgaatgaggttctagaaatggataaagattatacttttttcaaagtagaaacagagaacaaattctcttttatgacatgtccctttatattgaatgctgtcacaaagaatttgggattatattatgacaatagaattcgcatgtacagtgaacgaagaatcactgttctctacagcttagttcaaggacagcagttgaatccatatttgagactcaaagttagacgtgaccatatcatagatgatgcacttgtccggctagagatgatcgctatggaaaatcctgcagacttgaagaagcagttgtatgtggaatttgaaggagaacaaggagttgatgagggaggtgtttccaaagaattttttcagctggttgtggaggaaatcttcaatccagatattggtatgttcacatacgatgaatctacaaaattgttttggtttaatccatcttcttttgaaactgagggtcagtttactctgattggcatagtactgggtctggctatttacaataactgtatactggatgtacattttcccatggttgtctacaggaagctaatggggaaaaaaggaacttttcgtgacttgggagactctcacccagttctatatcagagtttaaaagatttattggagtatgaagggaatgtggaagatgacatgatgatcactttccagatatcacagacagatctttttggtaacccaatgatgtatgatctaaaggaaaatggtgataaaattccaattacaaatgaaaacaggaaggaatttgtcaatctttattctgactacattctcaataaatcagtagaaaaacagttcaaggcttttcggagaggttttcatatggtgaccaatgaatctcccttaaagtacttattcagaccagaagaaattgaattgcttatatgtggaagccggaatctagatttccaagcactagaagaaactacagaatatgacggtggctataccagggactctgttctgattagggagttctgggaaatcgttcattcatttacagatgaacagaaaagactcttcttgcagtttacaacgggcacagacagagcacctgtgggaggactaggaaaattaaagatgattatagccaaaaatggcccagacacagaaaggttacctacatctcatacttgctttaatgtgcttttacttccggaatactcaagcaaagaaaaacttaaagagagattgttgaaggccatcacgtatgccaaaggatttggcatgctgtaaaacaaaacaaaacaaaataaaacaaaaaaaaggaaggaaaaaaaaagaaaaaatttaaaaaattttaaaaatataacgagggataaatttttggtggtgatagtgtcccagtacaaaaaggctgtaagatagtcaaccacagtagtcacctatgtctgtgcctcccttctttattggggacatgtgggctggaacagcagatttcagctacatatatgaacaaatcctttattattattataattatttttttgcgtgaaagtgttacatattctttcacttgtatgtacagagaggtttttctgaatatttattttaagggttaaatcacttttgcttgtgtttattactgcttgaggttgagccttttgagtatttaaaaaatatataccaacagaactactctcccaaggaaaatattgccaccatttgtagaccacgtaaccttcaagtatgtgctacttttttgtccctgtatctaactcaaatcaggaactgtattttttttaatgatttgcttttgaaacttgaagtcttgaaaacagtgtgatgcaattactgctgttctagcccccaaagagttttctgtgcaaaatcttgagaatcaatcaataaagaaagatggaaggaagggagaaattggaatgttttaactgcagccctcagaactttagtaacagcacaacaaattaaaaacaaaaacaactcatgccacagtatgtcgtcttcatgtgtcttgcaatgaactgtttcagtagccaatcctctttcttagtatatgaaaggacagggatttttgttcttgttgttctcgttgttgttttaagtttactggggaaagtgcatttggccaaatgaaatggtagtcaagcctattgcaacaaagttaggaagtttgttgtttgtttattataaacaaaaagcatgtgaaagtgcacttaagatagagtttttattaattacttacttattacctagattttaaatagacaatccaaagtctccccttcgtgttgccatcatcttgttgaatcagccattttatcgaggcacgtgatcagtgttgcaacataatgaaaaagatggctactgtgccttgtgttacttaatcatacagtaagctgacctggaaatgaatgaaactattactcctaagaattacattgtatagccccacagattaaatttaattaattaattcaaaacatgttaaacgttactttcatgtactatggaaaagtacaagtaggtttacattactgatttccagaagtaagtagtttcccctttcctagtcttctgtgtatgtgatgttgttaatttcttttattgcattataaaataaaaggattatgtatttttaactaaggtgagacattgatatatccttttgctacaagctatagctaatgtgctgagcttgtgccttggtgattgattgattgattgactgattgttttaactgattactgtagatcaacctgatgatttgtttgtttgaaattggcaggaaaaatgcagctttcaaatcattggggggagaaaaaggatgtctttcaggattattttaattaatttttttcataattgagacagaactgtttgttatgtaccataatgctaaataaaactgtggcacttttcaccataatttaatttagtggaaaaagaagacaatgctttccatattgtgataaggtaacatggggtttttctgggccagcctttagaacactgttagggtacatacgctaccttgatgaaagggaccttcgtgcaactgtagtcatcttaaaggcttctcatccactgtgcttcttaatgtgtaattaaagtgaggagaaattaaatactctgagggcgttttatataataaattcgtgaagaaatgtgtgctcttcagttctcaagttttattattatggtatttattaaagttctacaattgtaataacgtatccatatgacaagttttaaagtggtaattgaaataggttatcagatatagagttgttcacatcaagtagacttttaacagagtcagaatgaacctacccttaaaattttagagaaaaaaaatcgtcggttgcacagaatagctgctctagcttgcttaattatgccgggcatgttgtcactcctcttacttttgctgccttttcattactatttaatggaatgtccctgaacaataaggaagagcaaaacatagacattttgactacagtggatacttcctctaccccaaatgttatgttataaaagtactttttttgcccaggtactctattatatattttggttttctttgaattagacctcaatctccaggaagctctggagggaaaaaaaggaaccataaactaaagtaactggttttccaaataaatgtaaacttttttaaccttttattattatagaacatttcaaacatacataaaacatgaaaacagcctgcagccaaacttttctggaccttggcagctccagcaaatgagctggtcatcctaaccctggtttcctgagacaactacttttggggatgcttgcttgtatagggagatgatagatagatagatacatatcaaaaagaaacttgaaaaaggcttcgaacagaacttgccgatgttactcatccctcctcggtacagacattctgttagaacagatggttgtaatggggcagcatcactccctattcccattaaaaacatgaccattctgagatttcaggccccttcgaggaatttttctcaagaattccatacaaactgtcagaggaagaaatgtcgtcccaagactagtccctgtgtagtcttgatccctttacctgcttactgtaattttttttctctgactttccgccagtgtctaagggccatctgtacccctcccacccttccatgagccactgtataatccaaaaacacaccttccatttgctccctcacttgtctccttttacctcaacagtgttagtgtgtaaagaattgcctggggagggtagagggttttacaagtacagagtcccaagtcttttctcccctccccgttagtgggttggcatttattaataggcactgcaagattttgatgcaggtgtggggtagatatcactgtgaaaggctactaatgcatggtagtttcaccgaaagtacagtcttcaaggatccttataatctcctcattgccaaaatcagtaacatctataaccttgacaacaccctagcttgggctgttgcttctctggctacttgtttttccatcccagtttacccagattttagatggatactcctccaattctgcttaaagtccttacctgttcttgcccagttccctctagtcaacctcagtcactcccaaagattcttccccaatcccatatcttttgctcagacctctgtctctgggatttctttgttacctcatagtcagtagtcctaaaaacaaaattcttcatcttgcatctctatcgaccgaccattctttgtttctttttaagaaatgtaaccttcaccccaatcatcaaaatctctcattcctcaattgtcacaggttgtcacttctttccccctaaacctctcccatcattccttccttctttatactgcccttacaggtcctgatcctctgactcacccggacattcttagcagctgcctaatttcactccctgactctcatctccctcttccaatccttttcattgtgctagaacactatcttgctaattttaatatcctctgcattcagtgcctccacagattgccccctcactgacctttccaatttggccttgtgttacacactttcctcgctgcattcctacccagcatcttcacttgtcatatttctcaaatactcttcatgaccagatatttaaagtacctcatccatgaagacttcatcaacccccaaagtgcctccaatgcttccgtggtagcacagcataatggggtacatttcttagttgaacagtgaggagtcactgggattcttacagagtgtcttagggtctcctcttgatactctttccacatttcagttaaggaattttcttacatctttttttcttctaataacctttgcctggagtgtaagtaaattcatgatagagactgtcatttttaaaaaaaaaaacaaaccattttgcctttcacatgttattacctccatctttctgttatcttgtcagtgttgccacctaaatgattgaaaatgaccgagcatgcagtagaatgtagtgaagtttcctatttcatccattttttgcataagtgcattggtatctgtatatccatctgcccaagcaccagttgttgaaaagactattatttccccatgaatggtcctggtacccttgtcaaagaacagttgaccataaatataagactttctggattctcagtcttactccattgccctatatgtctgtcgttataccagcaccgcactgtcttgatggctgtagcttggtagtaagtttagatttgggatgtgcaagtcctccattttttttttttttttccccaaaatcattttgtctgttttgggtcccttgcattgcatatgaatttttatatgatcattgtgtcaattcctgcaaaacagctgggatcttgatagggatttagttgaattggtagataaatttgagaaataactgctattttaatggtgttaggttttctgttccatgactgtgggatgtctttgcatttgcttaggtctttatttcagtgatgttttagagatttcagtgtgcaagtcttgacgtctttaatttttttctaagtattttactgatgccactttaattatatgattattttctaatttttatttttgtattcatcactggtgttagaaataaaattaatttttgtatattgattttgtatattgtagcttttctaaaattctttttttgtcacttagtattttttgcatatgagatcatgcatctgtgaacagaaatacttttacttcttcctttccagtctagattcctattatttcattttcttgccttagtgtgctggctagcacctccagtacaatattggatagaagtgacaagagcagacatctttttcttgttcctgattttaaggggaaagcattcagtctttcaccattgagtatgatgttagctagctgtgggtttgcttcaagttgaggaaattcttttattaaacctagtttactgagtgttttttaatcaaaaaaaaaaaaaggaggggctgtgggttttgttaaatgcttcttctgtatcaagattttcatgttgttttgtcctttattaatatgttgtattaatggacttttgtatattgaattaactttgcattcctgggataatctcagttgtccatgctacataaaccttgttctatgctgctgga

SEQ ID NO: 648 - DNA, 8955 bp, Homo sapiens
  source 1..8955: mol_type = genomic DNA
agtcctcccgtcttgcgccgcggccgcgagatccgtgtgtctcccaagatggtggcgctgggctcggggtgactacaggagacgacggggccttttcccttcgccaggacccgacacaccaggcttcgctcgctcgcgcacccctccgccgcgtagccatccgccagcgcgggcgcccgccatccgccgcctacttacgcttcacctctgccgacccggcgcgctcggctgcgggcggcggcgcctccttcggctcctcctcggaatagctcgcggcctgtagcccctggcaggagggcccctcagccccccggtgtggacaggcagcggcggctggcgacgaacgccgggatttcggcggccccggcgctccctttcccggcctcgttttccggataaggaagcgcgggtcccgcatgagccccggcggtggcggcagcgaaagagaacgaggcggtggcgggcggaggcggcgggcgagggcgactacgaccagtgaggcggccgccgcagcccaggcgcgggggcgacgacaggttaaaaatctgtaagagcctgattttagaattcaccagctcctcagaagtttggcgaaatatgagttattaagcctacgctcagatcaaggtagcagctagactggtgtgacaacctgtttttaatcagtgactcaaagctgtgatcaccctgatgtcaccgaatggccacagcttgtaaaagagagttacagtggaggtaaaaggagtggcttgcaggatggagaagctgcaccagtgttattggaactctgcctccttacagtatgacatctgatgctggagggtcgcactttcaaaaatgagtcagctggtacatggggttatcatcaatttttagctcttctgtctgggagatacaagtttggaagcaatcttggggtacttacccacaaggctggtggagaccagatcaggagaacctcagtctgacgacattgaagctagccgaatgaagcgagcagctgcaaagcatctaatagaacgctactaccaccagttaactgagggctgtggaaatgaagcctgcacgaatgagttttgtgcttcctgtccaacttttcttcgtatggataataatgcagcagctattaaagccctcgagctttataagattaatgcaaaactctgtgatcctcatccctccaagaaaggagcaagctcagcttaccttgagaactcgaaaggtgcccccaacaactcctgctctgagataaaaatgaacaagaaaggcgctagaattgattttaaagatgtgacttacttaacagaagagaaggtatatgaaattcttgaattatgtagagaaagagaggattattcccctttaatccgtgttattggaagagttttttctagtgctgaggcattggtacagagcttccggaaagttaaacaacacaccaaggaagaactgaaatctcttcaagcaaaagatgaagacaaagatgaagatgaaaaggaaaaagctgcatgttctgctgctgctatggaagaagactcagaagcatcttcctcaaggataggtgatagctcacagggagacaacaatttgcaaaaattaggccctgatgatgtgtctgtggatattgatgccattagaagggtctacaccagattgctctctaatgaaaaaattgaaactgcctttctcaatgcacttgtatatttgtcacctaacgtggaatgtgacttgacgtatcacaatgtatactctcgagatcctaattatctgaatttgttcattatcgtaatggagaatagaaatctccacagtcctgaatatctggaaatggctttgccattattttgcaaagcgatgagcaagctaccccttgcagcccaaggaaaactgatcagactgtggtctaaatacaatgcagaccagattcggagaatgatggagacatttcagcaacttattacttataaagtcataagcaatgaatttaacagtcgaaatctagtgaatgatgatgatgccattgttgctgcttcgaagtgcttgaaaatggtttactatgcaaatgtagtgggaggggaagtggacacaaatcacaatgaagaagatgatgaagagcccatccctgagtccagcgagctgacacttcaggaacttttgggagaagaaagaagaaacaagaaaggtcctcgagtggaccccctggaaactgaacttggtgttaaaaccctggattgtcgaaaaccacttatcccttttgaagagtttattaatgaaccactgaatgaggttctagaaatggataaagattatacttttttcaaagtagaaacagagaacaaattctcttttatgacatgtccctttatattgaatgctgtcacaaagaatttgggattatattatgacaatagaattcgcatgtacagtgaacgaagaatcactgttctctacagcttagttcaaggacagcagttgaatccatatttgagactcaaagttagacgtgaccatatcatagatgatgcacttgtccggctagagatgatcgctatggaaaatcctgcagacttgaagaagcagttgtatgtggaatttgaaggagaacaaggagttgatgagggaggtgtttccaaagaattttttcagctggttgtggaggaaatcttcaatccagatattggtatgttcacatacgatgaatctacaaaattgttttggtttaatccatcttcttttgaaactgagggtcagtttactctgattggcatagtactgggtctggctatttacaataactgtatactggatgtacattttcccatggttgtctacaggaagctaatggggaaaaaaggaacttttcgtgacttgggagactctcacccagttctatatcagagtttaaaagatttattggagtatgaagggaatgtggaagatgacatgatgatcactttccagatatcacagacagatctttttggtaacccaatgatgtatgatctaaaggaaaatggtgataaaattccaattacaaatgaaaacaggaaggaatttgtcaatctttattctgactacattctcaataaatcagtagaaaaacagttcaaggcttttcggagaggttttcatatggtgaccaatgaatctcccttaaagtacttattcagaccagaagaaattgaattgcttatatgtggaagccggaatctagatttccaagcactagaagaaactacagaatatgacggtggctataccagggactctgttctgattagggagttctgggaaatcgttcattcatttacagatgaacagaaaagactcttcttgcagtttacaacgggcacagacagagcacctgtgggaggactaggaaaattaaagatgattatagccaaaaatggcccagacacagaaaggttacctacatctcatacttgctttaatgtgcttttacttccggaatactcaagcaaagaaaaacttaaagagagattgttgaaggccatcacgtatgccaaaggatttggcatgctgtaaaacaaaacaaaacaaaataaaacaaaaaaaaggaaggaaaaaaaaagaaaaaatttaaaaaattttaaaaatataacgagggataaatttttggtggtgatagtgtcccagtacaaaaaggctgtaagatagtcaaccacagtagtcacctatgtctgtgcctcccttctttattggggacatgtgggctggaacagcagatttcagctacatatatgaacaaatcctttattattattataattatttttttgcgtgaaagtgttacatattctttcacttgtatgtacagagaggtttttctgaatatttattttaagggttaaatcacttttgcttgtgtttattactgcttgaggttgagccttttgagtatttaaaaaatatataccaacagaactactctcccaaggaaaatattgccaccatttgtagaccacgtaaccttcaagtatgtgctacttttttgtccctgtatctaactcaaatcaggaactgtattttttttaatgatttgcttttgaaacttgaagtcttgaaaacagtgtgatgcaattactgctgttctagcccccaaagagttttctgtgcaaaatcttgagaatcaatcaataaagaaagatggaaggaagggagaaattggaatgttttaactgcagccctcagaactttagtaacagcacaacaaattaaaaacaaaaacaactcatgccacagtatgtcgtcttcatgtgtcttgcaatgaactgtttcagtagccaatcctctttcttagtatatgaaaggacagggatttttgttcttgttgttctcgttgttgttttaagtttactggggaaagtgcatttggccaaatgaaatggtagtcaagcctattgcaacaaagttaggaagtttgttgtttgtttattataaacaaaaagcatgtgaaagtgcacttaagatagagtttttattaattacttacttattacctagattttaaatagacaatccaaagtctccccttcgtgttgccatcatcttgttgaatcagccattttatcgaggcacgtgatcagtgttgcaacataatgaaaaagatggctactgtgccttgtgttacttaatcatacagtaagctgacctggaaatgaatgaaactattactcctaagaattacattgtatagccccacagattaaatttaattaattaattcaaaacatgttaaacgttactttcatgtactatggaaaagtacaagtaggtttacattactgatttccagaagtaagtagtttcccctttcctagtcttctgtgtatgtgatgttgttaatttcttttattgcattataaaataaaaggattatgtatttttaactaaggtgagacattgatatatccttttgctacaagctatagctaatgtgctgagcttgtgccttggtgattgattgattgattgactgattgttttaactgattactgtagatcaacctgatgatttgtttgtttgaaattggcaggaaaaatgcagctttcaaatcattggggggagaaaaaggatgtctttcaggattattttaattaatttttttcataattgagacagaactgtttgttatgtaccataatgctaaataaaactgtggcacttttcaccataatttaatttagtggaaaaagaagacaatgctttccatattgtgataaggtaacatggggtttttctgggccagcctttagaacactgttagggtacatacgctaccttgatgaaagggaccttcgtgcaactgtagtcatcttaaaggcttctcatccactgtgcttcttaatgtgtaattaaagtgaggagaaattaaatactctgagggcgttttatataataaattcgtgaagaaatgtgtgctcttcagttctcaagttttattattatggtatttattaaagttctacaattgtaataacgtatccatatgacaagttttaaagtggtaattgaaataggttatcagatatagagttgttcacatcaagtagacttttaacagagtcagaatgaacctacccttaaaattttagagaaaaaaaatcgtcggttgcacagaatagctgctctagcttgcttaattatgccgggcatgttgtcactcctcttacttttgctgccttttcattactatttaatggaatgtccctgaacaataaggaagagcaaaacatagacattttgactacagtggatacttcctctaccccaaatgttatgttataaaagtactttttttgcccaggtactctattatatattttggttttctttgaattagacctcaatctccaggaagctctggagggaaaaaaaggaaccataaactaaagtaactggttttccaaataaatgtaaacttttttaaccttttattattatagaacatttcaaacatacataaaacatgaaaacagcctgcagccaaacttttctggaccttggcagctccagcaaatgagctggtcatcctaaccctggtttcctgagacaactacttttggggatgcttgcttgtatagggagatgatagatagatagatacatatcaaaaagaaacttgaaaaaggcttcgaacagaacttgccgatgttactcatccctcctcggtacagacattctgttagaacagatggttgtaatggggcagcatcactccctattcccattaaaaacatgaccattctgagatttcaggccccttcgaggaatttttctcaagaattccatacaaactgtcagaggaagaaatgtcgtcccaagactagtccctgtgtagtcttgatccctttacctgcttactgtaattttttttctctgactttccgccagtgtctaagggccatctgtacccctcccacccttccatgagccactgtataatccaaaaacacaccttccatttgctccctcacttgtctccttttacctcaacagtgttagtgtgtaaagaattgcctggggagggtagagggttttacaagtacagagtcccaagtcttttctcccctccccgttagtgggttggcatttattaataggcactgcaagattttgatgcaggtgtggggtagatatcactgtgaaaggctactaatgcatggtagtttcaccgaaagtacagtcttcaaggatccttataatctcctcattgccaaaatcagtaacatctataaccttgacaacaccctagcttgggctgttgcttctctggctacttgtttttccatcccagtttacccagattttagatggatactcctccaattctgcttaaagtccttacctgttcttgcccagttccctctagtcaacctcagtcactcccaaagattcttccccaatcccatatcttttgctcagacctctgtctctgggatttctttgttacctcatagtcagtagtcctaaaaacaaaattcttcatcttgcatctctatcgaccgaccattctttgtttctttttaagaaatgtaaccttcaccccaatcatcaaaatctctcattcctcaattgtcacaggttgtcacttctttccccctaaacctctcccatcattccttccttctttatactgcccttacaggtcctgatcctctgactcacccggacattcttagcagctgcctaatttcactccctgactctcatctccctcttccaatccttttcattgtgctagaacactatcttgctaattttaatatcctctgcattcagtgcctccacagattgccccctcactgacctttccaatttggccttgtgttacacactttcctcgctgcattcctacccagcatcttcacttgtcatatttctcaaatactcttcatgaccagatatttaaagtacctcatccatgaagacttcatcaacccccaaagtgcctccaatgcttccgtggtagcacagcataatggggtacatttcttagttgaacagtgaggagtcactgggattcttacagagtgtcttagggtctcctcttgatactctttccacatttcagttaaggaattttcttacatctttttttcttctaataacctttgcctggagtgtaagtaaattcatgatagagactgtcatttttaaaaaaaaaaacaaaccattttgcctttcacatgttattacctccatctttctgttatcttgtcagtgttgccacctaaatgattgaaaatgaccgagcatgcagtagaatgtagtgaagtttcctatttcatccattttttgcataagtgcattggtatctgtatatccatctgcccaagcaccagttgttgaaaagactattatttccccatgaatggtcctggtacccttgtcaaagaacagttgaccataaatataagactttctggattctcagtcttactccattgccctatatgtctgtcgttataccagcaccgcactgtcttgatggctgtagcttggtagtaagtttagatttgggatgtgcaagtcctccattttttttttttttttccccaaaatcattttgtctgttttgggtcccttgcattgcatatgaatttttatatgatcattgtgtcaattcctgcaaaacagctgggatcttgatagggatttagttgaattggtagataaatttgagaaataactgctattttaatggtgttaggttttctgttccatgactgtgggatgtctttgcatttgcttaggtctttatttcagtgatgttttagagatttcagtgtgcaagtcttgacgtctttaatttttttctaagtattttactgatgccactttaattatatgattattttctaatttttatttttgtattcatcactggtgttagaaataaaattaatttttgtatattgattttgtatattgtagcttttctaaaattctttttttgtcacttagtattttttgcatatgagatcatgcatctgtgaacagaaatacttttacttcttcctttccagtctagattcctattatttcattttcttgccttagtgtgctggctagcacctccagtacaatattggatagaagtgacaagagcagacatctttttcttgttcctgattttaaggggaaagcattcagtctttcaccattgagtatgatgttagctagctgtgggtttgcttcaagttgaggaaattcttttattaaacctagtttactgagtgttttttaatcaaaaaaaaaaaaaggaggggctgtgggttttgttaaatgcttcttctgtatcaagattttcatgttgttttgtcctttattaatatgttgtattaatggacttttgtatattgaattaactttgcattcctgggataatctcagttgtccatgctacataaaccttgttctatgctgctgga

SEQ ID NO: 649 - DNA, 8989 bp, Homo sapiens
  source 1..8989: mol_type = genomic DNA
agtcctcccgtcttgcgccgcggccgcgagatccgtgtgtctcccaagatggtggcgctgggctcggggtgactacaggagacgacggggccttttcccttcgccaggacccgacacaccaggcttcgctcgctcgcgcacccctccgccgcgtagccatccgccagcgcgggcgcccgccatccgccgcctacttacgcttcacctctgccgacccggcgcgctcggctgcgggcggcggcgcctccttcggctcctcctcggaatagctcgcggcctgtagcccctggcaggagggcccctcagccccccggtgtggacaggcagcggcggctggcgacgaacgccgggatttcggcggccccggcgctccctttcccggcctcgttttccggataaggaagcgcgggtcccgcatgagccccggcggtggcggcagcgaaagagaacgaggcggtggcgggcggaggcggcgggcgagggcgactacgaccagtgaggcggccgccgcagcccaggcgcgggggcgacgacaggttaaaaatctgtaagagcctgattttagaattcaccagctcctcagaagtttggcgaaatatgagttattaagcctacgctcagatcaaggtagcagctagactggtgtgacaacctgtttttaatcagtgactcaaagctgtgatcaccctgatgtcaccgaatggccacagcttgtaaaagagagttacagtggaggtaaaaggagtggcttgcaggatggagaagctgcaccagtgttattggaatgccagcaggtttattttttgttttgcaagccagctctgcctccttacagtatgacatctgatgctggagggtcgcactttcaaaaatgagtcagctggtacatggggttatcatcaatttttagctcttctgtctgggagatacaagtttggaagcaatcttggggtacttacccacaaggctggtggagaccagatcaggagaacctcagtctgacgacattgaagctagccgaatgaagcgagcagctgcaaagcatctaatagaacgctactaccaccagttaactgagggctgtggaaatgaagcctgcacgaatgagttttgtgcttcctgtccaacttttcttcgtatggataataatgcagcagctattaaagccctcgagctttataagattaatgcaaaactctgtgatcctcatccctccaagaaaggagcaagctcagcttaccttgagaactcgaaaggtgcccccaacaactcctgctctgagataaaaatgaacaagaaaggcgctagaattgattttaaagatgtgacttacttaacagaagagaaggtatatgaaattcttgaattatgtagagaaagagaggattattcccctttaatccgtgttattggaagagttttttctagtgctgaggcattggtacagagcttccggaaagttaaacaacacaccaaggaagaactgaaatctcttcaagcaaaagatgaagacaaagatgaagatgaaaaggaaaaagctgcatgttctgctgctgctatggaagaagactcagaagcatcttcctcaaggataggtgatagctcacagggagacaacaatttgcaaaaattaggccctgatgatgtgtctgtggatattgatgccattagaagggtctacaccagattgctctctaatgaaaaaattgaaactgcctttctcaatgcacttgtatatttgtcacctaacgtggaatgtgacttgacgtatcacaatgtatactctcgagatcctaattatctgaatttgttcattatcgtaatggagaatagaaatctccacagtcctgaatatctggaaatggctttgccattattttgcaaagcgatgagcaagctaccccttgcagcccaaggaaaactgatcagactgtggtctaaatacaatgcagaccagattcggagaatgatggagacatttcagcaacttattacttataaagtcataagcaatgaatttaacagtcgaaatctagtgaatgatgatgatgccattgttgctgcttcgaagtgcttgaaaatggtttactatgcaaatgtagtgggaggggaagtggacacaaatcacaatgaagaagatgatgaagagcccatccctgagtccagcgagctgacacttcaggaacttttgggagaagaaagaagaaacaagaaaggtcctcgagtggaccccctggaaactgaacttggtgttaaaaccctggattgtcgaaaaccacttatcccttttgaagagtttattaatgaaccactgaatgaggttctagaaatggataaagattatacttttttcaaagtagaaacagagaacaaattctcttttatgacatgtccctttatattgaatgctgtcacaaagaatttgggattatattatgacaatagaattcgcatgtacagtgaacgaagaatcactgttctctacagcttagttcaaggacagcagttgaatccatatttgagactcaaagttagacgtgaccatatcatagatgatgcacttgtccggctagagatgatcgctatggaaaatcctgcagacttgaagaagcagttgtatgtggaatttgaaggagaacaaggagttgatgagggaggtgtttccaaagaattttttcagctggttgtggaggaaatcttcaatccagatattggtatgttcacatacgatgaatctacaaaattgttttggtttaatccatcttcttttgaaactgagggtcagtttactctgattggcatagtactgggtctggctatttacaataactgtatactggatgtacattttcccatggttgtctacaggaagctaatggggaaaaaaggaacttttcgtgacttgggagactctcacccagttctatatcagagtttaaaagatttattggagtatgaagggaatgtggaagatgacatgatgatcactttccagatatcacagacagatctttttggtaacccaatgatgtatgatctaaaggaaaatggtgataaaattccaattacaaatgaaaacaggaaggaatttgtcaatctttattctgactacattctcaataaatcagtagaaaaacagttcaaggcttttcggagaggttttcatatggtgaccaatgaatctcccttaaagtacttattcagaccagaagaaattgaattgcttatatgtggaagccggaatctagatttccaagcactagaagaaactacagaatatgacggtggctataccagggactctgttctgattagggagttctgggaaatcgttcattcatttacagatgaacagaaaagactcttcttgcagtttacaacgggcacagacagagcacctgtgggaggactaggaaaattaaagatgattatagccaaaaatggcccagacacagaaaggttacctacatctcatacttgctttaatgtgcttttacttccggaatactcaagcaaagaaaaacttaaagagagattgttgaaggccatcacgtatgccaaaggatttggcatgctgtaaaacaaaacaaaacaaaataaaacaaaaaaaaggaaggaaaaaaaaagaaaaaatttaaaaaattttaaaaatataacgagggataaatttttggtggtgatagtgtcccagtacaaaaaggctgtaagatagtcaaccacagtagtcacctatgtctgtgcctcccttctttattggggacatgtgggctggaacagcagatttcagctacatatatgaacaaatcctttattattattataattatttttttgcgtgaaagtgttacatattctttcacttgtatgtacagagaggtttttctgaatatttattttaagggttaaatcacttttgcttgtgtttattactgcttgaggttgagccttttgagtatttaaaaaatatataccaacagaactactctcccaaggaaaatattgccaccatttgtagaccacgtaaccttcaagtatgtgctacttttttgtccctgtatctaactcaaatcaggaactgtattttttttaatgatttgcttttgaaacttgaagtcttgaaaacagtgtgatgcaattactgctgttctagcccccaaagagttttctgtgcaaaatcttgagaatcaatcaataaagaaagatggaaggaagggagaaattggaatgttttaactgcagccctcagaactttagtaacagcacaacaaattaaaaacaaaaacaactcatgccacagtatgtcgtcttcatgtgtcttgcaatgaactgtttcagtagccaatcctctttcttagtatatgaaaggacagggatttttgttcttgttgttctcgttgttgttttaagtttactggggaaagtgcatttggccaaatgaaatggtagtcaagcctattgcaacaaagttaggaagtttgttgtttgtttattataaacaaaaagcatgtgaaagtgcacttaagatagagtttttattaattacttacttattacctagattttaaatagacaatccaaagtctccccttcgtgttgccatcatcttgttgaatcagccattttatcgaggcacgtgatcagtgttgcaacataatgaaaaagatggctactgtgccttgtgttacttaatcatacagtaagctgacctggaaatgaatgaaactattactcctaagaattacattgtatagccccacagattaaatttaattaattaattcaaaacatgttaaacgttactttcatgtactatggaaaagtacaagtaggtttacattactgatttccagaagtaagtagtttcccctttcctagtcttctgtgtatgtgatgttgttaatttcttttattgcattataaaataaaaggattatgtatttttaactaaggtgagacattgatatatccttttgctacaagctatagctaatgtgctgagcttgtgccttggtgattgattgattgattgactgattgttttaactgattactgtagatcaacctgatgatttgtttgtttgaaattggcaggaaaaatgcagctttcaaatcattggggggagaaaaaggatgtctttcaggattattttaattaatttttttcataattgagacagaactgtttgttatgtaccataatgctaaataaaactgtggcacttttcaccataatttaatttagtggaaaaagaagacaatgctttccatattgtgataaggtaacatggggtttttctgggccagcctttagaacactgttagggtacatacgctaccttgatgaaagggaccttcgtgcaactgtagtcatcttaaaggcttctcatccactgtgcttcttaatgtgtaattaaagtgaggagaaattaaatactctgagggcgttttatataataaattcgtgaagaaatgtgtgctcttcagttctcaagttttattattatggtatttattaaagttctacaattgtaataacgtatccatatgacaagttttaaagtggtaattgaaataggttatcagatatagagttgttcacatcaagtagacttttaacagagtcagaatgaacctacccttaaaattttagagaaaaaaaatcgtcggttgcacagaatagctgctctagcttgcttaattatgccgggcatgttgtcactcctcttacttttgctgccttttcattactatttaatggaatgtccctgaacaataaggaagagcaaaacatagacattttgactacagtggatacttcctctaccccaaatgttatgttataaaagtactttttttgcccaggtactctattatatattttggttttctttgaattagacctcaatctccaggaagctctggagggaaaaaaaggaaccataaactaaagtaactggttttccaaataaatgtaaacttttttaaccttttattattatagaacatttcaaacatacataaaacatgaaaacagcctgcagccaaacttttctggaccttggcagctccagcaaatgagctggtcatcctaaccctggtttcctgagacaactacttttggggatgcttgcttgtatagggagatgatagatagatagatacatatcaaaaagaaacttgaaaaaggcttcgaacagaacttgccgatgttactcatccctcctcggtacagacattctgttagaacagatggttgtaatggggcagcatcactccctattcccattaaaaacatgaccattctgagatttcaggccccttcgaggaatttttctcaagaattccatacaaactgtcagaggaagaaatgtcgtcccaagactagtccctgtgtagtcttgatccctttacctgcttactgtaattttttttctctgactttccgccagtgtctaagggccatctgtacccctcccacccttccatgagccactgtataatccaaaaacacaccttccatttgctccctcacttgtctccttttacctcaacagtgttagtgtgtaaagaattgcctggggagggtagagggttttacaagtacagagtcccaagtcttttctcccctccccgttagtgggttggcatttattaataggcactgcaagattttgatgcaggtgtggggtagatatcactgtgaaaggctactaatgcatggtagtttcaccgaaagtacagtcttcaaggatccttataatctcctcattgccaaaatcagtaacatctataaccttgacaacaccctagcttgggctgttgcttctctggctacttgtttttccatcccagtttacccagattttagatggatactcctccaattctgcttaaagtccttacctgttcttgcccagttccctctagtcaacctcagtcactcccaaagattcttccccaatcccatatcttttgctcagacctctgtctctgggatttctttgttacctcatagtcagtagtcctaaaaacaaaattcttcatcttgcatctctatcgaccgaccattctttgtttctttttaagaaatgtaaccttcaccccaatcatcaaaatctctcattcctcaattgtcacaggttgtcacttctttccccctaaacctctcccatcattccttccttctttatactgcccttacaggtcctgatcctctgactcacccggacattcttagcagctgcctaatttcactccctgactctcatctccctcttccaatccttttcattgtgctagaacactatcttgctaattttaatatcctctgcattcagtgcctccacagattgccccctcactgacctttccaatttggccttgtgttacacactttcctcgctgcattcctacccagcatcttcacttgtcatatttctcaaatactcttcatgaccagatatttaaagtacctcatccatgaagacttcatcaacccccaaagtgcctccaatgcttccgtggtagcacagcataatggggtacatttcttagttgaacagtgaggagtcactgggattcttacagagtgtcttagggtctcctcttgatactctttccacatttcagttaaggaattttcttacatctttttttcttctaataacctttgcctggagtgtaagtaaattcatgatagagactgtcatttttaaaaaaaaaaacaaaccattttgcctttcacatgttattacctccatctttctgttatcttgtcagtgttgccacctaaatgattgaaaatgaccgagcatgcagtagaatgtagtgaagtttcctatttcatccattttttgcataagtgcattggtatctgtatatccatctgcccaagcaccagttgttgaaaagactattatttccccatgaatggtcctggtacccttgtcaaagaacagttgaccataaatataagactttctggattctcagtcttactccattgccctatatgtctgtcgttataccagcaccgcactgtcttgatggctgtagcttggtagtaagtttagatttgggatgtgcaagtcctccattttttttttttttttccccaaaatcattttgtctgttttgggtcccttgcattgcatatgaatttttatatgatcattgtgtcaattcctgcaaaacagctgggatcttgatagggatttagttgaattggtagataaatttgagaaataactgctattttaatggtgttaggttttctgttccatgactgtgggatgtctttgcatttgcttaggtctttatttcagtgatgttttagagatttcagtgtgcaagtcttgacgtctttaatttttttctaagtattttactgatgccactttaattatatgattattttctaatttttatttttgtattcatcactggtgttagaaataaaattaatttttgtatattgattttgtatattgtagcttttctaaaattctttttttgtcacttagtattttttgcatatgagatcatgcatctgtgaacagaaatacttttacttcttcctttccagtctagattcctattatttcattttcttgccttagtgtgctggctagcacctccagtacaatattggatagaagtgacaagagcagacatctttttcttgttcctgattttaaggggaaagcattcagtctttcaccattgagtatgatgttagctagctgtgggtttgcttcaagttgaggaaattcttttattaaacctagtttactgagtgttttttaatcaaaaaaaaaaaaaggaggggctgtgggttttgttaaatgcttcttctgtatcaagattttcatgttgttttgtcctttattaatatgttgtattaatggacttttgtatattgaattaactttgcattcctgggataatctcagttgtccatgctacataaaccttgttctatgctgctgga

SEQ ID NO: 650 - DNA, 9037 bp, Homo sapiens
  source 1..9037: mol_type = genomic DNA
agtcctcccgtcttgcgccgcggccgcgagatccgtgtgtctcccaagatggtggcgctgggctcggggtgactacaggagacgacggggccttttcccttcgccaggacccgacacaccaggcttcgctcgctcgcgcacccctccgccgcgtagccatccgccagcgcgggcgcccgccatccgccgcctacttacgcttcacctctgccgacccggcgcgctcggctgcgggcggcggcgcctccttcggctcctcctcggaatagctcgcggcctgtagcccctggcaggagggcccctcagccccccggtgtggacaggcagcggcggctggcgacgaacgccgggatttcggcggccccggcgctccctttcccggcctcgttttccggataaggaagcgcgggtcccgcatgagccccggcggtggcggcagcgaaagagaacgaggcggtggcgggcggaggcggcgggcgagggcgactacgaccagtgaggcggccgccgcagcccaggcgcgggggcgacgacaggttaaaaatctgtaagagcctgattttagaattcaccagctcctcagaagtttggcgaaatatgagttattaagcctacgctcagatcaaggtagcagctagactggtgtgacaacctgtttttaatcagtgactcaaagctgtgatcaccctgatgtcaccgaatggccacagcttgtaaaagagagttacagtggaggtaaaaggagtggcttgcaggatggagaagctgcaccagtgttattggaagtgagccaccatttgaatttgctagctcatgctgcagtattcagattatgccagcaggtttattttttgttttgcaagccagctctgcctccttacagtatgacatctgatgctggagggtcgcactttcaaaaatgagtcagctggtacatggggttatcatcaatttttagctcttctgtctgggagatacaagtttggaagcaatcttggggtacttacccacaaggctggtggagaccagatcaggagaacctcagtctgacgacattgaagctagccgaatgaagcgagcagctgcaaagcatctaatagaacgctactaccaccagttaactgagggctgtggaaatgaagcctgcacgaatgagttttgtgcttcctgtccaacttttcttcgtatggataataatgcagcagctattaaagccctcgagctttataagattaatgcaaaactctgtgatcctcatccctccaagaaaggagcaagctcagcttaccttgagaactcgaaaggtgcccccaacaactcctgctctgagataaaaatgaacaagaaaggcgctagaattgattttaaagatgtgacttacttaacagaagagaaggtatatgaaattcttgaattatgtagagaaagagaggattattcccctttaatccgtgttattggaagagttttttctagtgctgaggcattggtacagagcttccggaaagttaaacaacacaccaaggaagaactgaaatctcttcaagcaaaagatgaagacaaagatgaagatgaaaaggaaaaagctgcatgttctgctgctgctatggaagaagactcagaagcatcttcctcaaggataggtgatagctcacagggagacaacaatttgcaaaaattaggccctgatgatgtgtctgtggatattgatgccattagaagggtctacaccagattgctctctaatgaaaaaattgaaactgcctttctcaatgcacttgtatatttgtcacctaacgtggaatgtgacttgacgtatcacaatgtatactctcgagatcctaattatctgaatttgttcattatcgtaatggagaatagaaatctccacagtcctgaatatctggaaatggctttgccattattttgcaaagcgatgagcaagctaccccttgcagcccaaggaaaactgatcagactgtggtctaaatacaatgcagaccagattcggagaatgatggagacatttcagcaacttattacttataaagtcataagcaatgaatttaacagtcgaaatctagtgaatgatgatgatgccattgttgctgcttcgaagtgcttgaaaatggtttactatgcaaatgtagtgggaggggaagtggacacaaatcacaatgaagaagatgatgaagagcccatccctgagtccagcgagctgacacttcaggaacttttgggagaagaaagaagaaacaagaaaggtcctcgagtggaccccctggaaactgaacttggtgttaaaaccctggattgtcgaaaaccacttatcccttttgaagagtttattaatgaaccactgaatgaggttctagaaatggataaagattatacttttttcaaagtagaaacagagaacaaattctcttttatgacatgtccctttatattgaatgctgtcacaaagaatttgggattatattatgacaatagaattcgcatgtacagtgaacgaagaatcactgttctctacagcttagttcaaggacagcagttgaatccatatttgagactcaaagttagacgtgaccatatcatagatgatgcacttgtccggctagagatgatcgctatggaaaatcctgcagacttgaagaagcagttgtatgtggaatttgaaggagaacaaggagttgatgagggaggtgtttccaaagaattttttcagctggttgtggaggaaatcttcaatccagatattggtatgttcacatacgatgaatctacaaaattgttttggtttaatccatcttcttttgaaactgagggtcagtttactctgattggcatagtactgggtctggctatttacaataactgtatactggatgtacattttcccatggttgtctacaggaagctaatggggaaaaaaggaacttttcgtgacttgggagactctcacccagttctatatcagagtttaaaagatttattggagtatgaagggaatgtggaagatgacatgatgatcactttccagatatcacagacagatctttttggtaacccaatgatgtatgatctaaaggaaaatggtgataaaattccaattacaaatgaaaacaggaaggaatttgtcaatctttattctgactacattctcaataaatcagtagaaaaacagttcaaggcttttcggagaggttttcatatggtgaccaatgaatctcccttaaagtacttattcagaccagaagaaattgaattgcttatatgtggaagccggaatctagatttccaagcactagaagaaactacagaatatgacggtggctataccagggactctgttctgattagggagttctgggaaatcgttcattcatttacagatgaacagaaaagactcttcttgcagtttacaacgggcacagacagagcacctgtgggaggactaggaaaattaaagatgattatagccaaaaatggcccagacacagaaaggttacctacatctcatacttgctttaatgtgcttttacttccggaatactcaagcaaagaaaaacttaaagagagattgttgaaggccatcacgtatgccaaaggatttggcatgctgtaaaacaaaacaaaacaaaataaaacaaaaaaaaggaaggaaaaaaaaagaaaaaatttaaaaaattttaaaaatataacgagggataaatttttggtggtgatagtgtcccagtacaaaaaggctgtaagatagtcaaccacagtagtcacctatgtctgtgcctcccttctttattggggacatgtgggctggaacagcagatttcagctacatatatgaacaaatcctttattattattataattatttttttgcgtgaaagtgttacatattctttcacttgtatgtacagagaggtttttctgaatatttattttaagggttaaatcacttttgcttgtgtttattactgcttgaggttgagccttttgagtatttaaaaaatatataccaacagaactactctcccaaggaaaatattgccaccatttgtagaccacgtaaccttcaagtatgtgctacttttttgtccctgtatctaactcaaatcaggaactgtattttttttaatgatttgcttttgaaacttgaagtcttgaaaacagtgtgatgcaattactgctgttctagcccccaaagagttttctgtgcaaaatcttgagaatcaatcaataaagaaagatggaaggaagggagaaattggaatgttttaactgcagccctcagaactttagtaacagcacaacaaattaaaaacaaaaacaactcatgccacagtatgtcgtcttcatgtgtcttgcaatgaactgtttcagtagccaatcctctttcttagtatatgaaaggacagggatttttgttcttgttgttctcgttgttgttttaagtttactggggaaagtgcatttggccaaatgaaatggtagtcaagcctattgcaacaaagttaggaagtttgttgtttgtttattataaacaaaaagcatgtgaaagtgcacttaagatagagtttttattaattacttacttattacctagattttaaatagacaatccaaagtctccccttcgtgttgccatcatcttgttgaatcagccattttatcgaggcacgtgatcagtgttgcaacataatgaaaaagatggctactgtgccttgtgttacttaatcatacagtaagctgacctggaaatgaatgaaactattactcctaagaattacattgtatagccccacagattaaatttaattaattaattcaaaacatgttaaacgttactttcatgtactatggaaaagtacaagtaggtttacattactgatttccagaagtaagtagtttcccctttcctagtcttctgtgtatgtgatgttgttaatttcttttattgcattataaaataaaaggattatgtatttttaactaaggtgagacattgatatatccttttgctacaagctatagctaatgtgctgagcttgtgccttggtgattgattgattgattgactgattgttttaactgattactgtagatcaacctgatgatttgtttgtttgaaattggcaggaaaaatgcagctttcaaatcattggggggagaaaaaggatgtctttcaggattattttaattaatttttttcataattgagacagaactgtttgttatgtaccataatgctaaataaaactgtggcacttttcaccataatttaatttagtggaaaaagaagacaatgctttccatattgtgataaggtaacatggggtttttctgggccagcctttagaacactgttagggtacatacgctaccttgatgaaagggaccttcgtgcaactgtagtcatcttaaaggcttctcatccactgtgcttcttaatgtgtaattaaagtgaggagaaattaaatactctgagggcgttttatataataaattcgtgaagaaatgtgtgctcttcagttctcaagttttattattatggtatttattaaagttctacaattgtaataacgtatccatatgacaagttttaaagtggtaattgaaataggttatcagatatagagttgttcacatcaagtagacttttaacagagtcagaatgaacctacccttaaaattttagagaaaaaaaatcgtcggttgcacagaatagctgctctagcttgcttaattatgccgggcatgttgtcactcctcttacttttgctgccttttcattactatttaatggaatgtccctgaacaataaggaagagcaaaacatagacattttgactacagtggatacttcctctaccccaaatgttatgttataaaagtactttttttgcccaggtactctattatatattttggttttctttgaattagacctcaatctccaggaagctctggagggaaaaaaaggaaccataaactaaagtaactggttttccaaataaatgtaaacttttttaaccttttattattatagaacatttcaaacatacataaaacatgaaaacagcctgcagccaaacttttctggaccttggcagctccagcaaatgagctggtcatcctaaccctggtttcctgagacaactacttttggggatgcttgcttgtatagggagatgatagatagatagatacatatcaaaaagaaacttgaaaaaggcttcgaacagaacttgccgatgttactcatccctcctcggtacagacattctgttagaacagatggttgtaatggggcagcatcactccctattcccattaaaaacatgaccattctgagatttcaggccccttcgaggaatttttctcaagaattccatacaaactgtcagaggaagaaatgtcgtcccaagactagtccctgtgtagtcttgatccctttacctgcttactgtaattttttttctctgactttccgccagtgtctaagggccatctgtacccctcccacccttccatgagccactgtataatccaaaaacacaccttccatttgctccctcacttgtctccttttacctcaacagtgttagtgtgtaaagaattgcctggggagggtagagggttttacaagtacagagtcccaagtcttttctcccctccccgttagtgggttggcatttattaataggcactgcaagattttgatgcaggtgtggggtagatatcactgtgaaaggctactaatgcatggtagtttcaccgaaagtacagtcttcaaggatccttataatctcctcattgccaaaatcagtaacatctataaccttgacaacaccctagcttgggctgttgcttctctggctacttgtttttccatcccagtttacccagattttagatggatactcctccaattctgcttaaagtccttacctgttcttgcccagttccctctagtcaacctcagtcactcccaaagattcttccccaatcccatatcttttgctcagacctctgtctctgggatttctttgttacctcatagtcagtagtcctaaaaacaaaattcttcatcttgcatctctatcgaccgaccattctttgtttctttttaagaaatgtaaccttcaccccaatcatcaaaatctctcattcctcaattgtcacaggttgtcacttctttccccctaaacctctcccatcattccttccttctttatactgcccttacaggtcctgatcctctgactcacccggacattcttagcagctgcctaatttcactccctgactctcatctccctcttccaatccttttcattgtgctagaacactatcttgctaattttaatatcctctgcattcagtgcctccacagattgccccctcactgacctttccaatttggccttgtgttacacactttcctcgctgcattcctacccagcatcttcacttgtcatatttctcaaatactcttcatgaccagatatttaaagtacctcatccatgaagacttcatcaacccccaaagtgcctccaatgcttccgtggtagcacagcataatggggtacatttcttagttgaacagtgaggagtcactgggattcttacagagtgtcttagggtctcctcttgatactctttccacatttcagttaaggaattttcttacatctttttttcttctaataacctttgcctggagtgtaagtaaattcatgatagagactgtcatttttaaaaaaaaaaacaaaccattttgcctttcacatgttattacctccatctttctgttatcttgtcagtgttgccacctaaatgattgaaaatgaccgagcatgcagtagaatgtagtgaagtttcctatttcatccattttttgcataagtgcattggtatctgtatatccatctgcccaagcaccagttgttgaaaagactattatttccccatgaatggtcctggtacccttgtcaaagaacagttgaccataaatataagactttctggattctcagtcttactccattgccctatatgtctgtcgttataccagcaccgcactgtcttgatggctgtagcttggtagtaagtttagatttgggatgtgcaagtcctccattttttttttttttttccccaaaatcattttgtctgttttgggtcccttgcattgcatatgaatttttatatgatcattgtgtcaattcctgcaaaacagctgggatcttgatagggatttagttgaattggtagataaatttgagaaataactgctattttaatggtgttaggttttctgttccatgactgtgggatgtctttgcatttgcttaggtctttatttcagtgatgttttagagatttcagtgtgcaagtcttgacgtctttaatttttttctaagtattttactgatgccactttaattatatgattattttctaatttttatttttgtattcatcactggtgttagaaataaaattaatttttgtatattgattttgtatattgtagcttttctaaaattctttttttgtcacttagtattttttgcatatgagatcatgcatctgtgaacagaaatacttttacttcttcctttccagtctagattcctattatttcattttcttgccttagtgtgctggctagcacctccagtacaatattggatagaagtgacaagagcagacatctttttcttgttcctgattttaaggggaaagcattcagtctttcaccattgagtatgatgttagctagctgtgggtttgcttcaagttgaggaaattcttttattaaacctagtttactgagtgttttttaatcaaaaaaaaaaaaaggaggggctgtgggttttgttaaatgcttcttctgtatcaagattttcatgttgttttgtcctttattaatatgttgtattaatggacttttgtatattgaattaactttgcattcctgggataatctcagttgtccatgctacataaaccttgttctatgctgctgga

SEQ ID NO: 651 - DNA, 9154 bp, Homo sapiens
  source 1..9154: mol_type = genomic DNA
agtcctcccgtcttgcgccgcggccgcgagatccgtgtgtctcccaagatggtggcgctgggctcggggtgactacaggagacgacggggccttttcccttcgccaggacccgacacaccaggcttcgctcgctcgcgcacccctccgccgcgtagccatccgccagcgcgggcgcccgccatccgccgcctacttacgcttcacctctgccgacccggcgcgctcggctgcgggcggcggcgcctccttcggctcctcctcggaatagctcgcggcctgtagcccctggcaggagggcccctcagccccccggtgtggacaggcagcggcggctggcgacgaacgccgggatttcggcggccccggcgctccctttcccggcctcgttttccggataaggaagcgcgggtcccgcatgagccccggcggtggcggcagcgaaagagaacgaggcggtggcgggcggaggcggcgggcgagggcgactacgaccagtgaggcggccgccgcagcccaggcgcgggggcgacgacagagactgccatactgttttccacagtgactgcaccattttacattcccaccagcagtgaataagggttccaatttctctgcatcttttctaacacttgaggggaggtatggtgtcaagaaaacatagtcaccattattacgaaaagtaaaatatggaagagatgatccctaccatcaatcagcttacaactagaggcactgacaaatgtatacagatagctgtaatgtaaggttaaaaatctgtaagagcctgattttagaattcaccagctcctcagaagtttggcgaaatatgagttattaagcctacgctcagatcaaggtagcagctagactggtgtgacaacctgtttttaatcagtgactcaaagctgtgatcaccctgatgtcaccgaatggccacagcttgtaaaagtgccagcaggtttattttttgttttgcaagccagctctgcctccttacagtatgacatctgatgctggagggtcgcactttcaaaaatgagtcagctggtacatggggttatcatcaatttttagctcttctgtctgggagatacaagtttggaagcaatcttggggtacttacccacaaggctggtggagaccagatcaggagaacctcagtctgacgacattgaagctagccgaatgaagcgagcagctgcaaagcatctaatagaacgctactaccaccagttaactgagggctgtggaaatgaagcctgcacgaatgagttttgtgcttcctgtccaacttttcttcgtatggataataatgcagcagctattaaagccctcgagctttataagattaatgcaaaactctgtgatcctcatccctccaagaaaggagcaagctcagcttaccttgagaactcgaaaggtgcccccaacaactcctgctctgagataaaaatgaacaagaaaggcgctagaattgattttaaagatgtgacttacttaacagaagagaaggtatatgaaattcttgaattatgtagagaaagagaggattattcccctttaatccgtgttattggaagagttttttctagtgctgaggcattggtacagagcttccggaaagttaaacaacacaccaaggaagaactgaaatctcttcaagcaaaagatgaagacaaagatgaagatgaaaaggaaaaagctgcatgttctgctgctgctatggaagaagactcagaagcatcttcctcaaggataggtgatagctcacagggagacaacaatttgcaaaaattaggccctgatgatgtgtctgtggatattgatgccattagaagggtctacaccagattgctctctaatgaaaaaattgaaactgcctttctcaatgcacttgtatatttgtcacctaacgtggaatgtgacttgacgtatcacaatgtatactctcgagatcctaattatctgaatttgttcattatcgtaatggagaatagaaatctccacagtcctgaatatctggaaatggctttgccattattttgcaaagcgatgagcaagctaccccttgcagcccaaggaaaactgatcagactgtggtctaaatacaatgcagaccagattcggagaatgatggagacatttcagcaacttattacttataaagtcataagcaatgaatttaacagtcgaaatctagtgaatgatgatgatgccattgttgctgcttcgaagtgcttgaaaatggtttactatgcaaatgtagtgggaggggaagtggacacaaatcacaatgaagaagatgatgaagagcccatccctgagtccagcgagctgacacttcaggaacttttgggagaagaaagaagaaacaagaaaggtcctcgagtggaccccctggaaactgaacttggtgttaaaaccctggattgtcgaaaaccacttatcccttttgaagagtttattaatgaaccactgaatgaggttctagaaatggataaagattatacttttttcaaagtagaaacagagaacaaattctcttttatgacatgtccctttatattgaatgctgtcacaaagaatttgggattatattatgacaatagaattcgcatgtacagtgaacgaagaatcactgttctctacagcttagttcaaggacagcagttgaatccatatttgagactcaaagttagacgtgaccatatcatagatgatgcacttgtccggctagagatgatcgctatggaaaatcctgcagacttgaagaagcagttgtatgtggaatttgaaggagaacaaggagttgatgagggaggtgtttccaaagaattttttcagctggttgtggaggaaatcttcaatccagatattggtatgttcacatacgatgaatctacaaaattgttttggtttaatccatcttcttttgaaactgagggtcagtttactctgattggcatagtactgggtctggctatttacaataactgtatactggatgtacattttcccatggttgtctacaggaagctaatggggaaaaaaggaacttttcgtgacttgggagactctcacccagttctatatcagagtttaaaagatttattggagtatgaagggaatgtggaagatgacatgatgatcactttccagatatcacagacagatctttttggtaacccaatgatgtatgatctaaaggaaaatggtgataaaattccaattacaaatgaaaacaggaaggaatttgtcaatctttattctgactacattctcaataaatcagtagaaaaacagttcaaggcttttcggagaggttttcatatggtgaccaatgaatctcccttaaagtacttattcagaccagaagaaattgaattgcttatatgtggaagccggaatctagatttccaagcactagaagaaactacagaatatgacggtggctataccagggactctgttctgattagggagttctgggaaatcgttcattcatttacagatgaacagaaaagactcttcttgcagtttacaacgggcacagacagagcacctgtgggaggactaggaaaattaaagatgattatagccaaaaatggcccagacacagaaaggttacctacatctcatacttgctttaatgtgcttttacttccggaatactcaagcaaagaaaaacttaaagagagattgttgaaggccatcacgtatgccaaaggatttggcatgctgtaaaacaaaacaaaacaaaataaaacaaaaaaaaggaaggaaaaaaaaagaaaaaatttaaaaaattttaaaaatataacgagggataaatttttggtggtgatagtgtcccagtacaaaaaggctgtaagatagtcaaccacagtagtcacctatgtctgtgcctcccttctttattggggacatgtgggctggaacagcagatttcagctacatatatgaacaaatcctttattattattataattatttttttgcgtgaaagtgttacatattctttcacttgtatgtacagagaggtttttctgaatatttattttaagggttaaatcacttttgcttgtgtttattactgcttgaggttgagccttttgagtatttaaaaaatatataccaacagaactactctcccaaggaaaatattgccaccatttgtagaccacgtaaccttcaagtatgtgctacttttttgtccctgtatctaactcaaatcaggaactgtattttttttaatgatttgcttttgaaacttgaagtcttgaaaacagtgtgatgcaattactgctgttctagcccccaaagagttttctgtgcaaaatcttgagaatcaatcaataaagaaagatggaaggaagggagaaattggaatgttttaactgcagccctcagaactttagtaacagcacaacaaattaaaaacaaaaacaactcatgccacagtatgtcgtcttcatgtgtcttgcaatgaactgtttcagtagccaatcctctttcttagtatatgaaaggacagggatttttgttcttgttgttctcgttgttgttttaagtttactggggaaagtgcatttggccaaatgaaatggtagtcaagcctattgcaacaaagttaggaagtttgttgtttgtttattataaacaaaaagcatgtgaaagtgcacttaagatagagtttttattaattacttacttattacctagattttaaatagacaatccaaagtctccccttcgtgttgccatcatcttgttgaatcagccattttatcgaggcacgtgatcagtgttgcaacataatgaaaaagatggctactgtgccttgtgttacttaatcatacagtaagctgacctggaaatgaatgaaactattactcctaagaattacattgtatagccccacagattaaatttaattaattaattcaaaacatgttaaacgttactttcatgtactatggaaaagtacaagtaggtttacattactgatttccagaagtaagtagtttcccctttcctagtcttctgtgtatgtgatgttgttaatttcttttattgcattataaaataaaaggattatgtatttttaactaaggtgagacattgatatatccttttgctacaagctatagctaatgtgctgagcttgtgccttggtgattgattgattgattgactgattgttttaactgattactgtagatcaacctgatgatttgtttgtttgaaattggcaggaaaaatgcagctttcaaatcattggggggagaaaaaggatgtctttcaggattattttaattaatttttttcataattgagacagaactgtttgttatgtaccataatgctaaataaaactgtggcacttttcaccataatttaatttagtggaaaaagaagacaatgctttccatattgtgataaggtaacatggggtttttctgggccagcctttagaacactgttagggtacatacgctaccttgatgaaagggaccttcgtgcaactgtagtcatcttaaaggcttctcatccactgtgcttcttaatgtgtaattaaagtgaggagaaattaaatactctgagggcgttttatataataaattcgtgaagaaatgtgtgctcttcagttctcaagttttattattatggtatttattaaagttctacaattgtaataacgtatccatatgacaagttttaaagtggtaattgaaataggttatcagatatagagttgttcacatcaagtagacttttaacagagtcagaatgaacctacccttaaaattttagagaaaaaaaatcgtcggttgcacagaatagctgctctagcttgcttaattatgccgggcatgttgtcactcctcttacttttgctgccttttcattactatttaatggaatgtccctgaacaataaggaagagcaaaacatagacattttgactacagtggatacttcctctaccccaaatgttatgttataaaagtactttttttgcccaggtactctattatatattttggttttctttgaattagacctcaatctccaggaagctctggagggaaaaaaaggaaccataaactaaagtaactggttttccaaataaatgtaaacttttttaaccttttattattatagaacatttcaaacatacataaaacatgaaaacagcctgcagccaaacttttctggaccttggcagctccagcaaatgagctggtcatcctaaccctggtttcctgagacaactacttttggggatgcttgcttgtatagggagatgatagatagatagatacatatcaaaaagaaacttgaaaaaggcttcgaacagaacttgccgatgttactcatccctcctcggtacagacattctgttagaacagatggttgtaatggggcagcatcactccctattcccattaaaaacatgaccattctgagatttcaggccccttcgaggaatttttctcaagaattccatacaaactgtcagaggaagaaatgtcgtcccaagactagtccctgtgtagtcttgatccctttacctgcttactgtaattttttttctctgactttccgccagtgtctaagggccatctgtacccctcccacccttccatgagccactgtataatccaaaaacacaccttccatttgctccctcacttgtctccttttacctcaacagtgttagtgtgtaaagaattgcctggggagggtagagggttttacaagtacagagtcccaagtcttttctcccctccccgttagtgggttggcatttattaataggcactgcaagattttgatgcaggtgtggggtagatatcactgtgaaaggctactaatgcatggtagtttcaccgaaagtacagtcttcaaggatccttataatctcctcattgccaaaatcagtaacatctataaccttgacaacaccctagcttgggctgttgcttctctggctacttgtttttccatcccagtttacccagattttagatggatactcctccaattctgcttaaagtccttacctgttcttgcccagttccctctagtcaacctcagtcactcccaaagattcttccccaatcccatatcttttgctcagacctctgtctctgggatttctttgttacctcatagtcagtagtcctaaaaacaaaattcttcatcttgcatctctatcgaccgaccattctttgtttctttttaagaaatgtaaccttcaccccaatcatcaaaatctctcattcctcaattgtcacaggttgtcacttctttccccctaaacctctcccatcattccttccttctttatactgcccttacaggtcctgatcctctgactcacccggacattcttagcagctgcctaatttcactccctgactctcatctccctcttccaatccttttcattgtgctagaacactatcttgctaattttaatatcctctgcattcagtgcctccacagattgccccctcactgacctttccaatttggccttgtgttacacactttcctcgctgcattcctacccagcatcttcacttgtcatatttctcaaatactcttcatgaccagatatttaaagtacctcatccatgaagacttcatcaacccccaaagtgcctccaatgcttccgtggtagcacagcataatggggtacatttcttagttgaacagtgaggagtcactgggattcttacagagtgtcttagggtctcctcttgatactctttccacatttcagttaaggaattttcttacatctttttttcttctaataacctttgcctggagtgtaagtaaattcatgatagagactgtcatttttaaaaaaaaaaacaaaccattttgcctttcacatgttattacctccatctttctgttatcttgtcagtgttgccacctaaatgattgaaaatgaccgagcatgcagtagaatgtagtgaagtttcctatttcatccattttttgcataagtgcattggtatctgtatatccatctgcccaagcaccagttgttgaaaagactattatttccccatgaatggtcctggtacccttgtcaaagaacagttgaccataaatataagactttctggattctcagtcttactccattgccctatatgtctgtcgttataccagcaccgcactgtcttgatggctgtagcttggtagtaagtttagatttgggatgtgcaagtcctccattttttttttttttttccccaaaatcattttgtctgttttgggtcccttgcattgcatatgaatttttatatgatcattgtgtcaattcctgcaaaacagctgggatcttgatagggatttagttgaattggtagataaatttgagaaataactgctattttaatggtgttaggttttctgttccatgactgtgggatgtctttgcatttgcttaggtctttatttcagtgatgttttagagatttcagtgtgcaagtcttgacgtctttaatttttttctaagtattttactgatgccactttaattatatgattattttctaatttttatttttgtattcatcactggtgttagaaataaaattaatttttgtatattgattttgtatattgtagcttttctaaaattctttttttgtcacttagtattttttgcatatgagatcatgcatctgtgaacagaaatacttttacttcttcctttccagtctagattcctattatttcattttcttgccttagtgtgctggctagcacctccagtacaatattggatagaagtgacaagagcagacatctttttcttgttcctgattttaaggggaaagcattcagtctttcaccattgagtatgatgttagctagctgtgggtttgcttcaagttgaggaaattcttttattaaacctagtttactgagtgttttttaatcaaaaaaaaaaaaaggaggggctgtgggttttgttaaatgcttcttctgtatcaagattttcatgttgttttgtcctttattaatatgttgtattaatggacttttgtatattgaattaactttgcattcctgggataatctcagttgtccatgctacataaaccttgttctatgctgctgga

SEQ ID NO: 652 - DNA, 9169 bp, Homo sapiens
  source 1..9169: mol_type = genomic DNA
agtcctcccgtcttgcgccgcggccgcgagatccgtgtgtctcccaagatggtggcgctgggctcggggtgactacaggagacgacggggccttttcccttcgccaggacccgacacaccaggcttcgctcgctcgcgcacccctccgccgcgtagccatccgccagcgcgggcgcccgccatccgccgcctacttacgcttcacctctgccgacccggcgcgctcggctgcgggcggcggcgcctccttcggctcctcctcggaatagctcgcggcctgtagcccctggcaggagggcccctcagccccccggtgtggacaggcagcggcggctggcgacgaacgccgggatttcggcggccccggcgctccctttcccggcctcgttttccggataaggaagcgcgggtcccgcatgagccccggcggtggcggcagcgaaagagaacgaggcggtggcgggcggaggcggcgggcgagggcgactacgaccagtgaggcggccgccgcagcccaggcgcgggggcgacgacagagactgccatactgttttccacagtgactgcaccattttacattcccaccagcagtgaataagggttccaatttctctgcatcttttctaacacttgaggggaggtatggtgtcaagaaaacatagtcaccattattacgaaaagtaaaatatggaagagatgatccctaccatcaatcagcttacaactagaggcactgacaaatgtatacagatagctgtaatgtaaggttaaaaatctgtaagagcctgattttagaattcaccagctcctcagaagtttggcgaaatatgagttattaagcctacgctcagatcaaggtagcagctagactggtgtgacaacctgtttttaatcagtgactcaaagctgtgatcaccctgatgtcaccgaatggccacagcttgtaaaagagagttacagtggaggtaaaaggagtggcttgcaggatggagaagctgcaccagtgttattggaatatgacatctgatgctggagggtcgcactttcaaaaatgagtcagctggtacatggggttatcatcaatttttagctcttctgtctgggagatacaagtttggaagcaatcttggggtacttacccacaaggctggtggagaccagatcaggagaacctcagtctgacgacattgaagctagccgaatgaagcgagcagctgcaaagcatctaatagaacgctactaccaccagttaactgagggctgtggaaatgaagcctgcacgaatgagttttgtgcttcctgtccaacttttcttcgtatggataataatgcagcagctattaaagccctcgagctttataagattaatgcaaaactctgtgatcctcatccctccaagaaaggagcaagctcagcttaccttgagaactcgaaaggtgcccccaacaactcctgctctgagataaaaatgaacaagaaaggcgctagaattgattttaaagatgtgacttacttaacagaagagaaggtatatgaaattcttgaattatgtagagaaagagaggattattcccctttaatccgtgttattggaagagttttttctagtgctgaggcattggtacagagcttccggaaagttaaacaacacaccaaggaagaactgaaatctcttcaagcaaaagatgaagacaaagatgaagatgaaaaggaaaaagctgcatgttctgctgctgctatggaagaagactcagaagcatcttcctcaaggataggtgatagctcacagggagacaacaatttgcaaaaattaggccctgatgatgtgtctgtggatattgatgccattagaagggtctacaccagattgctctctaatgaaaaaattgaaactgcctttctcaatgcacttgtatatttgtcacctaacgtggaatgtgacttgacgtatcacaatgtatactctcgagatcctaattatctgaatttgttcattatcgtaatggagaatagaaatctccacagtcctgaatatctggaaatggctttgccattattttgcaaagcgatgagcaagctaccccttgcagcccaaggaaaactgatcagactgtggtctaaatacaatgcagaccagattcggagaatgatggagacatttcagcaacttattacttataaagtcataagcaatgaatttaacagtcgaaatctagtgaatgatgatgatgccattgttgctgcttcgaagtgcttgaaaatggtttactatgcaaatgtagtgggaggggaagtggacacaaatcacaatgaagaagatgatgaagagcccatccctgagtccagcgagctgacacttcaggaacttttgggagaagaaagaagaaacaagaaaggtcctcgagtggaccccctggaaactgaacttggtgttaaaaccctggattgtcgaaaaccacttatcccttttgaagagtttattaatgaaccactgaatgaggttctagaaatggataaagattatacttttttcaaagtagaaacagagaacaaattctcttttatgacatgtccctttatattgaatgctgtcacaaagaatttgggattatattatgacaatagaattcgcatgtacagtgaacgaagaatcactgttctctacagcttagttcaaggacagcagttgaatccatatttgagactcaaagttagacgtgaccatatcatagatgatgcacttgtccggctagagatgatcgctatggaaaatcctgcagacttgaagaagcagttgtatgtggaatttgaaggagaacaaggagttgatgagggaggtgtttccaaagaattttttcagctggttgtggaggaaatcttcaatccagatattggtatgttcacatacgatgaatctacaaaattgttttggtttaatccatcttcttttgaaactgagggtcagtttactctgattggcatagtactgggtctggctatttacaataactgtatactggatgtacattttcccatggttgtctacaggaagctaatggggaaaaaaggaacttttcgtgacttgggagactctcacccagttctatatcagagtttaaaagatttattggagtatgaagggaatgtggaagatgacatgatgatcactttccagatatcacagacagatctttttggtaacccaatgatgtatgatctaaaggaaaatggtgataaaattccaattacaaatgaaaacaggaaggaatttgtcaatctttattctgactacattctcaataaatcagtagaaaaacagttcaaggcttttcggagaggttttcatatggtgaccaatgaatctcccttaaagtacttattcagaccagaagaaattgaattgcttatatgtggaagccggaatctagatttccaagcactagaagaaactacagaatatgacggtggctataccagggactctgttctgattagggagttctgggaaatcgttcattcatttacagatgaacagaaaagactcttcttgcagtttacaacgggcacagacagagcacctgtgggaggactaggaaaattaaagatgattatagccaaaaatggcccagacacagaaaggttacctacatctcatacttgctttaatgtgcttttacttccggaatactcaagcaaagaaaaacttaaagagagattgttgaaggccatcacgtatgccaaaggatttggcatgctgtaaaacaaaacaaaacaaaataaaacaaaaaaaaggaaggaaaaaaaaagaaaaaatttaaaaaattttaaaaatataacgagggataaatttttggtggtgatagtgtcccagtacaaaaaggctgtaagatagtcaaccacagtagtcacctatgtctgtgcctcccttctttattggggacatgtgggctggaacagcagatttcagctacatatatgaacaaatcctttattattattataattatttttttgcgtgaaagtgttacatattctttcacttgtatgtacagagaggtttttctgaatatttattttaagggttaaatcacttttgcttgtgtttattactgcttgaggttgagccttttgagtatttaaaaaatatataccaacagaactactctcccaaggaaaatattgccaccatttgtagaccacgtaaccttcaagtatgtgctacttttttgtccctgtatctaactcaaatcaggaactgtattttttttaatgatttgcttttgaaacttgaagtcttgaaaacagtgtgatgcaattactgctgttctagcccccaaagagttttctgtgcaaaatcttgagaatcaatcaataaagaaagatggaaggaagggagaaattggaatgttttaactgcagccctcagaactttagtaacagcacaacaaattaaaaacaaaaacaactcatgccacagtatgtcgtcttcatgtgtcttgcaatgaactgtttcagtagccaatcctctttcttagtatatgaaaggacagggatttttgttcttgttgttctcgttgttgttttaagtttactggggaaagtgcatttggccaaatgaaatggtagtcaagcctattgcaacaaagttaggaagtttgttgtttgtttattataaacaaaaagcatgtgaaagtgcacttaagatagagtttttattaattacttacttattacctagattttaaatagacaatccaaagtctccccttcgtgttgccatcatcttgttgaatcagccattttatcgaggcacgtgatcagtgttgcaacataatgaaaaagatggctactgtgccttgtgttacttaatcatacagtaagctgacctggaaatgaatgaaactattactcctaagaattacattgtatagccccacagattaaatttaattaattaattcaaaacatgttaaacgttactttcatgtactatggaaaagtacaagtaggtttacattactgatttccagaagtaagtagtttcccctttcctagtcttctgtgtatgtgatgttgttaatttcttttattgcattataaaataaaaggattatgtatttttaactaaggtgagacattgatatatccttttgctacaagctatagctaatgtgctgagcttgtgccttggtgattgattgattgattgactgattgttttaactgattactgtagatcaacctgatgatttgtttgtttgaaattggcaggaaaaatgcagctttcaaatcattggggggagaaaaaggatgtctttcaggattattttaattaatttttttcataattgagacagaactgtttgttatgtaccataatgctaaataaaactgtggcacttttcaccataatttaatttagtggaaaaagaagacaatgctttccatattgtgataaggtaacatggggtttttctgggccagcctttagaacactgttagggtacatacgctaccttgatgaaagggaccttcgtgcaactgtagtcatcttaaaggcttctcatccactgtgcttcttaatgtgtaattaaagtgaggagaaattaaatactctgagggcgttttatataataaattcgtgaagaaatgtgtgctcttcagttctcaagttttattattatggtatttattaaagttctacaattgtaataacgtatccatatgacaagttttaaagtggtaattgaaataggttatcagatatagagttgttcacatcaagtagacttttaacagagtcagaatgaacctacccttaaaattttagagaaaaaaaatcgtcggttgcacagaatagctgctctagcttgcttaattatgccgggcatgttgtcactcctcttacttttgctgccttttcattactatttaatggaatgtccctgaacaataaggaagagcaaaacatagacattttgactacagtggatacttcctctaccccaaatgttatgttataaaagtactttttttgcccaggtactctattatatattttggttttctttgaattagacctcaatctccaggaagctctggagggaaaaaaaggaaccataaactaaagtaactggttttccaaataaatgtaaacttttttaaccttttattattatagaacatttcaaacatacataaaacatgaaaacagcctgcagccaaacttttctggaccttggcagctccagcaaatgagctggtcatcctaaccctggtttcctgagacaactacttttggggatgcttgcttgtatagggagatgatagatagatagatacatatcaaaaagaaacttgaaaaaggcttcgaacagaacttgccgatgttactcatccctcctcggtacagacattctgttagaacagatggttgtaatggggcagcatcactccctattcccattaaaaacatgaccattctgagatttcaggccccttcgaggaatttttctcaagaattccatacaaactgtcagaggaagaaatgtcgtcccaagactagtccctgtgtagtcttgatccctttacctgcttactgtaattttttttctctgactttccgccagtgtctaagggccatctgtacccctcccacccttccatgagccactgtataatccaaaaacacaccttccatttgctccctcacttgtctccttttacctcaacagtgttagtgtgtaaagaattgcctggggagggtagagggttttacaagtacagagtcccaagtcttttctcccctccccgttagtgggttggcatttattaataggcactgcaagattttgatgcaggtgtggggtagatatcactgtgaaaggctactaatgcatggtagtttcaccgaaagtacagtcttcaaggatccttataatctcctcattgccaaaatcagtaacatctataaccttgacaacaccctagcttgggctgttgcttctctggctacttgtttttccatcccagtttacccagattttagatggatactcctccaattctgcttaaagtccttacctgttcttgcccagttccctctagtcaacctcagtcactcccaaagattcttccccaatcccatatcttttgctcagacctctgtctctgggatttctttgttacctcatagtcagtagtcctaaaaacaaaattcttcatcttgcatctctatcgaccgaccattctttgtttctttttaagaaatgtaaccttcaccccaatcatcaaaatctctcattcctcaattgtcacaggttgtcacttctttccccctaaacctctcccatcattccttccttctttatactgcccttacaggtcctgatcctctgactcacccggacattcttagcagctgcctaatttcactccctgactctcatctccctcttccaatccttttcattgtgctagaacactatcttgctaattttaatatcctctgcattcagtgcctccacagattgccccctcactgacctttccaatttggccttgtgttacacactttcctcgctgcattcctacccagcatcttcacttgtcatatttctcaaatactcttcatgaccagatatttaaagtacctcatccatgaagacttcatcaacccccaaagtgcctccaatgcttccgtggtagcacagcataatggggtacatttcttagttgaacagtgaggagtcactgggattcttacagagtgtcttagggtctcctcttgatactctttccacatttcagttaaggaattttcttacatctttttttcttctaataacctttgcctggagtgtaagtaaattcatgatagagactgtcatttttaaaaaaaaaaacaaaccattttgcctttcacatgttattacctccatctttctgttatcttgtcagtgttgccacctaaatgattgaaaatgaccgagcatgcagtagaatgtagtgaagtttcctatttcatccattttttgcataagtgcattggtatctgtatatccatctgcccaagcaccagttgttgaaaagactattatttccccatgaatggtcctggtacccttgtcaaagaacagttgaccataaatataagactttctggattctcagtcttactccattgccctatatgtctgtcgttataccagcaccgcactgtcttgatggctgtagcttggtagtaagtttagatttgggatgtgcaagtcctccattttttttttttttttccccaaaatcattttgtctgttttgggtcccttgcattgcatatgaatttttatatgatcattgtgtcaattcctgcaaaacagctgggatcttgatagggatttagttgaattggtagataaatttgagaaataactgctattttaatggtgttaggttttctgttccatgactgtgggatgtctttgcatttgcttaggtctttatttcagtgatgttttagagatttcagtgtgcaagtcttgacgtctttaatttttttctaagtattttactgatgccactttaattatatgattattttctaatttttatttttgtattcatcactggtgttagaaataaaattaatttttgtatattgattttgtatattgtagcttttctaaaattctttttttgtcacttagtattttttgcatatgagatcatgcatctgtgaacagaaatacttttacttcttcctttccagtctagattcctattatttcattttcttgccttagtgtgctggctagcacctccagtacaatattggatagaagtgacaagagcagacatctttttcttgttcctgattttaaggggaaagcattcagtctttcaccattgagtatgatgttagctagctgtgggtttgcttcaagttgaggaaattcttttattaaacctagtttactgagtgttttttaatcaaaaaaaaaaaaaggaggggctgtgggttttgttaaatgcttcttctgtatcaagattttcatgttgttttgtcctttattaatatgttgtattaatggacttttgtatattgaattaactttgcattcctgggataatctcagttgtccatgctacataaaccttgttctatgctgctgga

SEQ ID NO: 653 - DNA, 8764 bp, Homo sapiens
  source 1..8764: mol_type = genomic DNA
agtcctcccgtcttgcgccgcggccgcgagatccgtgtgtctcccaagatggtggcgctgggctcggggtgactacaggagacgacggggccttttcccttcgccaggacccgacacaccaggcttcgctcgctcgcgcacccctccgccgcgtagccatccgccagcgcgggcgcccgccatccgccgcctacttacgcttcacctctgccgacccggcgcgctcggctgcgggcggcggcgcctccttcggctcctcctcggaatagctcgcggcctgtagcccctggcaggagggcccctcagccccccggtgtggacaggcagcggcggctggcgacgaacgccgggatttcggcggccccggcgctccctttcccggcctcgttttccggataaggaagcgcgggtcccgcatgagccccggcggtggcggcagcgaaagagaacgaggcggtggcgggcggaggcggcgggcgagggcgactacgaccagtgaggcggccgccgcagcccaggcgcgggggcgacgacagggtaaataccttaaattggaattactgggtcacatggttaaaaatctgtaagagcctgattttagaattcaccagctcctcagaagtttggcgaaatatgagttattaagcctacgctcagatcaaggtagcagctagactggtgtgacaacctgtttttaatcagtgactcaaagctgtgatcaccctgatgtcaccgaatggccacagcttgtaaaagatcaggagaacctcagtctgacgacattgaagctagccgaatgaagcgagcagctgcaaagcatctaatagaacgctactaccaccagttaactgagggctgtggaaatgaagcctgcacgaatgagttttgtgcttcctgtccaacttttcttcgtatggataataatgcagcagctattaaagccctcgagctttataagattaatgcaaaactctgtgatcctcatccctccaagaaaggagcaagctcagcttaccttgagaactcgaaaggtgcccccaacaactcctgctctgagataaaaatgaacaagaaaggcgctagaattgattttaaagatgtgacttacttaacagaagagaaggtatatgaaattcttgaattatgtagagaaagagaggattattcccctttaatccgtgttattggaagagttttttctagtgctgaggcattggtacagagcttccggaaagttaaacaacacaccaaggaagaactgaaatctcttcaagcaaaagatgaagacaaagatgaagatgaaaaggaaaaagctgcatgttctgctgctgctatggaagaagactcagaagcatcttcctcaaggataggtgatagctcacagggagacaacaatttgcaaaaattaggccctgatgatgtgtctgtggatattgatgccattagaagggtctacaccagattgctctctaatgaaaaaattgaaactgcctttctcaatgcacttgtatatttgtcacctaacgtggaatgtgacttgacgtatcacaatgtatactctcgagatcctaattatctgaatttgttcattatcgtaatggagaatagaaatctccacagtcctgaatatctggaaatggctttgccattattttgcaaagcgatgagcaagctaccccttgcagcccaaggaaaactgatcagactgtggtctaaatacaatgcagaccagattcggagaatgatggagacatttcagcaacttattacttataaagtcataagcaatgaatttaacagtcgaaatctagtgaatgatgatgatgccattgttgctgcttcgaagtgcttgaaaatggtttactatgcaaatgtagtgggaggggaagtggacacaaatcacaatgaagaagatgatgaagagcccatccctgagtccagcgagctgacacttcaggaacttttgggagaagaaagaagaaacaagaaaggtcctcgagtggaccccctggaaactgaacttggtgttaaaaccctggattgtcgaaaaccacttatcccttttgaagagtttattaatgaaccactgaatgaggttctagaaatggataaagattatacttttttcaaagtagaaacagagaacaaattctcttttatgacatgtccctttatattgaatgctgtcacaaagaatttgggattatattatgacaatagaattcgcatgtacagtgaacgaagaatcactgttctctacagcttagttcaaggacagcagttgaatccatatttgagactcaaagttagacgtgaccatatcatagatgatgcacttgtccggctagagatgatcgctatggaaaatcctgcagacttgaagaagcagttgtatgtggaatttgaaggagaacaaggagttgatgagggaggtgtttccaaagaattttttcagctggttgtggaggaaatcttcaatccagatattggtatgttcacatacgatgaatctacaaaattgttttggtttaatccatcttcttttgaaactgagggtcagtttactctgattggcatagtactgggtctggctatttacaataactgtatactggatgtacattttcccatggttgtctacaggaagctaatggggaaaaaaggaacttttcgtgacttgggagactctcacccagttctatatcagagtttaaaagatttattggagtatgaagggaatgtggaagatgacatgatgatcactttccagatatcacagacagatctttttggtaacccaatgatgtatgatctaaaggaaaatggtgataaaattccaattacaaatgaaaacaggaaggaatttgtcaatctttattctgactacattctcaataaatcagtagaaaaacagttcaaggcttttcggagaggttttcatatggtgaccaatgaatctcccttaaagtacttattcagaccagaagaaattgaattgcttatatgtggaagccggaatctagatttccaagcactagaagaaactacagaatatgacggtggctataccagggactctgttctgattagggagttctgggaaatcgttcattcatttacagatgaacagaaaagactcttcttgcagtttacaacgggcacagacagagcacctgtgggaggactaggaaaattaaagatgattatagccaaaaatggcccagacacagaaaggttacctacatctcatacttgctttaatgtgcttttacttccggaatactcaagcaaagaaaaacttaaagagagattgttgaaggccatcacgtatgccaaaggatttggcatgctgtaaaacaaaacaaaacaaaataaaacaaaaaaaaggaaggaaaaaaaaagaaaaaatttaaaaaattttaaaaatataacgagggataaatttttggtggtgatagtgtcccagtacaaaaaggctgtaagatagtcaaccacagtagtcacctatgtctgtgcctcccttctttattggggacatgtgggctggaacagcagatttcagctacatatatgaacaaatcctttattattattataattatttttttgcgtgaaagtgttacatattctttcacttgtatgtacagagaggtttttctgaatatttattttaagggttaaatcacttttgcttgtgtttattactgcttgaggttgagccttttgagtatttaaaaaatatataccaacagaactactctcccaaggaaaatattgccaccatttgtagaccacgtaaccttcaagtatgtgctacttttttgtccctgtatctaactcaaatcaggaactgtattttttttaatgatttgcttttgaaacttgaagtcttgaaaacagtgtgatgcaattactgctgttctagcccccaaagagttttctgtgcaaaatcttgagaatcaatcaataaagaaagatggaaggaagggagaaattggaatgttttaactgcagccctcagaactttagtaacagcacaacaaattaaaaacaaaaacaactcatgccacagtatgtcgtcttcatgtgtcttgcaatgaactgtttcagtagccaatcctctttcttagtatatgaaaggacagggatttttgttcttgttgttctcgttgttgttttaagtttactggggaaagtgcatttggccaaatgaaatggtagtcaagcctattgcaacaaagttaggaagtttgttgtttgtttattataaacaaaaagcatgtgaaagtgcacttaagatagagtttttattaattacttacttattacctagattttaaatagacaatccaaagtctccccttcgtgttgccatcatcttgttgaatcagccattttatcgaggcacgtgatcagtgttgcaacataatgaaaaagatggctactgtgccttgtgttacttaatcatacagtaagctgacctggaaatgaatgaaactattactcctaagaattacattgtatagccccacagattaaatttaattaattaattcaaaacatgttaaacgttactttcatgtactatggaaaagtacaagtaggtttacattactgatttccagaagtaagtagtttcccctttcctagtcttctgtgtatgtgatgttgttaatttcttttattgcattataaaataaaaggattatgtatttttaactaaggtgagacattgatatatccttttgctacaagctatagctaatgtgctgagcttgtgccttggtgattgattgattgattgactgattgttttaactgattactgtagatcaacctgatgatttgtttgtttgaaattggcaggaaaaatgcagctttcaaatcattggggggagaaaaaggatgtctttcaggattattttaattaatttttttcataattgagacagaactgtttgttatgtaccataatgctaaataaaactgtggcacttttcaccataatttaatttagtggaaaaagaagacaatgctttccatattgtgataaggtaacatggggtttttctgggccagcctttagaacactgttagggtacatacgctaccttgatgaaagggaccttcgtgcaactgtagtcatcttaaaggcttctcatccactgtgcttcttaatgtgtaattaaagtgaggagaaattaaatactctgagggcgttttatataataaattcgtgaagaaatgtgtgctcttcagttctcaagttttattattatggtatttattaaagttctacaattgtaataacgtatccatatgacaagttttaaagtggtaattgaaataggttatcagatatagagttgttcacatcaagtagacttttaacagagtcagaatgaacctacccttaaaattttagagaaaaaaaatcgtcggttgcacagaatagctgctctagcttgcttaattatgccgggcatgttgtcactcctcttacttttgctgccttttcattactatttaatggaatgtccctgaacaataaggaagagcaaaacatagacattttgactacagtggatacttcctctaccccaaatgttatgttataaaagtactttttttgcccaggtactctattatatattttggttttctttgaattagacctcaatctccaggaagctctggagggaaaaaaaggaaccataaactaaagtaactggttttccaaataaatgtaaacttttttaaccttttattattatagaacatttcaaacatacataaaacatgaaaacagcctgcagccaaacttttctggaccttggcagctccagcaaatgagctggtcatcctaaccctggtttcctgagacaactacttttggggatgcttgcttgtatagggagatgatagatagatagatacatatcaaaaagaaacttgaaaaaggcttcgaacagaacttgccgatgttactcatccctcctcggtacagacattctgttagaacagatggttgtaatggggcagcatcactccctattcccattaaaaacatgaccattctgagatttcaggccccttcgaggaatttttctcaagaattccatacaaactgtcagaggaagaaatgtcgtcccaagactagtccctgtgtagtcttgatccctttacctgcttactgtaattttttttctctgactttccgccagtgtctaagggccatctgtacccctcccacccttccatgagccactgtataatccaaaaacacaccttccatttgctccctcacttgtctccttttacctcaacagtgttagtgtgtaaagaattgcctggggagggtagagggttttacaagtacagagtcccaagtcttttctcccctccccgttagtgggttggcatttattaataggcactgcaagattttgatgcaggtgtggggtagatatcactgtgaaaggctactaatgcatggtagtttcaccgaaagtacagtcttcaaggatccttataatctcctcattgccaaaatcagtaacatctataaccttgacaacaccctagcttgggctgttgcttctctggctacttgtttttccatcccagtttacccagattttagatggatactcctccaattctgcttaaagtccttacctgttcttgcccagttccctctagtcaacctcagtcactcccaaagattcttccccaatcccatatcttttgctcagacctctgtctctgggatttctttgttacctcatagtcagtagtcctaaaaacaaaattcttcatcttgcatctctatcgaccgaccattctttgtttctttttaagaaatgtaaccttcaccccaatcatcaaaatctctcattcctcaattgtcacaggttgtcacttctttccccctaaacctctcccatcattccttccttctttatactgcccttacaggtcctgatcctctgactcacccggacattcttagcagctgcctaatttcactccctgactctcatctccctcttccaatccttttcattgtgctagaacactatcttgctaattttaatatcctctgcattcagtgcctccacagattgccccctcactgacctttccaatttggccttgtgttacacactttcctcgctgcattcctacccagcatcttcacttgtcatatttctcaaatactcttcatgaccagatatttaaagtacctcatccatgaagacttcatcaacccccaaagtgcctccaatgcttccgtggtagcacagcataatggggtacatttcttagttgaacagtgaggagtcactgggattcttacagagtgtcttagggtctcctcttgatactctttccacatttcagttaaggaattttcttacatctttttttcttctaataacctttgcctggagtgtaagtaaattcatgatagagactgtcatttttaaaaaaaaaaacaaaccattttgcctttcacatgttattacctccatctttctgttatcttgtcagtgttgccacctaaatgattgaaaatgaccgagcatgcagtagaatgtagtgaagtttcctatttcatccattttttgcataagtgcattggtatctgtatatccatctgcccaagcaccagttgttgaaaagactattatttccccatgaatggtcctggtacccttgtcaaagaacagttgaccataaatataagactttctggattctcagtcttactccattgccctatatgtctgtcgttataccagcaccgcactgtcttgatggctgtagcttggtagtaagtttagatttgggatgtgcaagtcctccattttttttttttttttccccaaaatcattttgtctgttttgggtcccttgcattgcatatgaatttttatatgatcattgtgtcaattcctgcaaaacagctgggatcttgatagggatttagttgaattggtagataaatttgagaaataactgctattttaatggtgttaggttttctgttccatgactgtgggatgtctttgcatttgcttaggtctttatttcagtgatgttttagagatttcagtgtgcaagtcttgacgtctttaatttttttctaagtattttactgatgccactttaattatatgattattttctaatttttatttttgtattcatcactggtgttagaaataaaattaatttttgtatattgattttgtatattgtagcttttctaaaattctttttttgtcacttagtattttttgcatatgagatcatgcatctgtgaacagaaatacttttacttcttcctttccagtctagattcctattatttcattttcttgccttagtgtgctggctagcacctccagtacaatattggatagaagtgacaagagcagacatctttttcttgttcctgattttaaggggaaagcattcagtctttcaccattgagtatgatgttagctagctgtgggtttgcttcaagttgaggaaattcttttattaaacctagtttactgagtgttttttaatcaaaaaaaaaaaaaggaggggctgtgggttttgttaaatgcttcttctgtatcaagattttcatgttgttttgtcctttattaatatgttgtattaatggacttttgtatattgaattaactttgcattcctgggataatctcagttgtccatgctacataaaccttgttctatgctgctgga

SEQ ID NO: 654 - DNA, 8960 bp, Homo sapiens
  source 1..8960: mol_type = genomic DNA
agtcctcccgtcttgcgccgcggccgcgagatccgtgtgtctcccaagatggtggcgctgggctcggggtgactacaggagacgacggggccttttcccttcgccaggacccgacacaccaggcttcgctcgctcgcgcacccctccgccgcgtagccatccgccagcgcgggcgcccgccatccgccgcctacttacgcttcacctctgccgacccggcgcgctcggctgcgggcggcggcgcctccttcggctcctcctcggaatagctcgcggcctgtagcccctggcaggagggcccctcagccccccggtgtggacaggcagcggcggctggcgacgaacgccgggatttcggcggccccggcgctccctttcccggcctcgttttccggataaggaagcgcgggtcccgcatgagccccggcggtggcggcagcgaaagagaacgaggcggtggcgggcggaggcggcgggcgagggcgactacgaccagtgaggcggccgccgcagcccaggcgcgggggcgacgacagggtaaataccttaaattggaattactgggtcacatggttaaaaatctgtaagagcctgattttagaattcaccagctcctcagaagtttggcgaaatatgagttattaagcctacgctcagatcaaggtagcagctagactggtgtgacaacctgtttttaatcagtgactcaaagctgtgatcaccctgatgtcaccgaatggccacagcttgtaaaagtgccagcaggtttattttttgttttgcaagccagctctgcctccttacagtatgacatctgatgctggagggtcgcactttcaaaaatgagtcagctggtacatggggttatcatcaatttttagctcttctgtctgggagatacaagtttggaagcaatcttggggtacttacccacaaggctggtggagaccagatcaggagaacctcagtctgacgacattgaagctagccgaatgaagcgagcagctgcaaagcatctaatagaacgctactaccaccagttaactgagggctgtggaaatgaagcctgcacgaatgagttttgtgcttcctgtccaacttttcttcgtatggataataatgcagcagctattaaagccctcgagctttataagattaatgcaaaactctgtgatcctcatccctccaagaaaggagcaagctcagcttaccttgagaactcgaaaggtgcccccaacaactcctgctctgagataaaaatgaacaagaaaggcgctagaattgattttaaagatgtgacttacttaacagaagagaaggtatatgaaattcttgaattatgtagagaaagagaggattattcccctttaatccgtgttattggaagagttttttctagtgctgaggcattggtacagagcttccggaaagttaaacaacacaccaaggaagaactgaaatctcttcaagcaaaagatgaagacaaagatgaagatgaaaaggaaaaagctgcatgttctgctgctgctatggaagaagactcagaagcatcttcctcaaggataggtgatagctcacagggagacaacaatttgcaaaaattaggccctgatgatgtgtctgtggatattgatgccattagaagggtctacaccagattgctctctaatgaaaaaattgaaactgcctttctcaatgcacttgtatatttgtcacctaacgtggaatgtgacttgacgtatcacaatgtatactctcgagatcctaattatctgaatttgttcattatcgtaatggagaatagaaatctccacagtcctgaatatctggaaatggctttgccattattttgcaaagcgatgagcaagctaccccttgcagcccaaggaaaactgatcagactgtggtctaaatacaatgcagaccagattcggagaatgatggagacatttcagcaacttattacttataaagtcataagcaatgaatttaacagtcgaaatctagtgaatgatgatgatgccattgttgctgcttcgaagtgcttgaaaatggtttactatgcaaatgtagtgggaggggaagtggacacaaatcacaatgaagaagatgatgaagagcccatccctgagtccagcgagctgacacttcaggaacttttgggagaagaaagaagaaacaagaaaggtcctcgagtggaccccctggaaactgaacttggtgttaaaaccctggattgtcgaaaaccacttatcccttttgaagagtttattaatgaaccactgaatgaggttctagaaatggataaagattatacttttttcaaagtagaaacagagaacaaattctcttttatgacatgtccctttatattgaatgctgtcacaaagaatttgggattatattatgacaatagaattcgcatgtacagtgaacgaagaatcactgttctctacagcttagttcaaggacagcagttgaatccatatttgagactcaaagttagacgtgaccatatcatagatgatgcacttgtccggctagagatgatcgctatggaaaatcctgcagacttgaagaagcagttgtatgtggaatttgaaggagaacaaggagttgatgagggaggtgtttccaaagaattttttcagctggttgtggaggaaatcttcaatccagatattggtatgttcacatacgatgaatctacaaaattgttttggtttaatccatcttcttttgaaactgagggtcagtttactctgattggcatagtactgggtctggctatttacaataactgtatactggatgtacattttcccatggttgtctacaggaagctaatggggaaaaaaggaacttttcgtgacttgggagactctcacccagttctatatcagagtttaaaagatttattggagtatgaagggaatgtggaagatgacatgatgatcactttccagatatcacagacagatctttttggtaacccaatgatgtatgatctaaaggaaaatggtgataaaattccaattacaaatgaaaacaggaaggaatttgtcaatctttattctgactacattctcaataaatcagtagaaaaacagttcaaggcttttcggagaggttttcatatggtgaccaatgaatctcccttaaagtacttattcagaccagaagaaattgaattgcttatatgtggaagccggaatctagatttccaagcactagaagaaactacagaatatgacggtggctataccagggactctgttctgattagggagttctgggaaatcgttcattcatttacagatgaacagaaaagactcttcttgcagtttacaacgggcacagacagagcacctgtgggaggactaggaaaattaaagatgattatagccaaaaatggcccagacacagaaaggttacctacatctcatacttgctttaatgtgcttttacttccggaatactcaagcaaagaaaaacttaaagagagattgttgaaggccatcacgtatgccaaaggatttggcatgctgtaaaacaaaacaaaacaaaataaaacaaaaaaaaggaaggaaaaaaaaagaaaaaatttaaaaaattttaaaaatataacgagggataaatttttggtggtgatagtgtcccagtacaaaaaggctgtaagatagtcaaccacagtagtcacctatgtctgtgcctcccttctttattggggacatgtgggctggaacagcagatttcagctacatatatgaacaaatcctttattattattataattatttttttgcgtgaaagtgttacatattctttcacttgtatgtacagagaggtttttctgaatatttattttaagggttaaatcacttttgcttgtgtttattactgcttgaggttgagccttttgagtatttaaaaaatatataccaacagaactactctcccaaggaaaatattgccaccatttgtagaccacgtaaccttcaagtatgtgctacttttttgtccctgtatctaactcaaatcaggaactgtattttttttaatgatttgcttttgaaacttgaagtcttgaaaacagtgtgatgcaattactgctgttctagcccccaaagagttttctgtgcaaaatcttgagaatcaatcaataaagaaagatggaaggaagggagaaattggaatgttttaactgcagccctcagaactttagtaacagcacaacaaattaaaaacaaaaacaactcatgccacagtatgtcgtcttcatgtgtcttgcaatgaactgtttcagtagccaatcctctttcttagtatatgaaaggacagggatttttgttcttgttgttctcgttgttgttttaagtttactggggaaagtgcatttggccaaatgaaatggtagtcaagcctattgcaacaaagttaggaagtttgttgtttgtttattataaacaaaaagcatgtgaaagtgcacttaagatagagtttttattaattacttacttattacctagattttaaatagacaatccaaagtctccccttcgtgttgccatcatcttgttgaatcagccattttatcgaggcacgtgatcagtgttgcaacataatgaaaaagatggctactgtgccttgtgttacttaatcatacagtaagctgacctggaaatgaatgaaactattactcctaagaattacattgtatagccccacagattaaatttaattaattaattcaaaacatgttaaacgttactttcatgtactatggaaaagtacaagtaggtttacattactgatttccagaagtaagtagtttcccctttcctagtcttctgtgtatgtgatgttgttaatttcttttattgcattataaaataaaaggattatgtatttttaactaaggtgagacattgatatatccttttgctacaagctatagctaatgtgctgagcttgtgccttggtgattgattgattgattgactgattgttttaactgattactgtagatcaacctgatgatttgtttgtttgaaattggcaggaaaaatgcagctttcaaatcattggggggagaaaaaggatgtctttcaggattattttaattaatttttttcataattgagacagaactgtttgttatgtaccataatgctaaataaaactgtggcacttttcaccataatttaatttagtggaaaaagaagacaatgctttccatattgtgataaggtaacatggggtttttctgggccagcctttagaacactgttagggtacatacgctaccttgatgaaagggaccttcgtgcaactgtagtcatcttaaaggcttctcatccactgtgcttcttaatgtgtaattaaagtgaggagaaattaaatactctgagggcgttttatataataaattcgtgaagaaatgtgtgctcttcagttctcaagttttattattatggtatttattaaagttctacaattgtaataacgtatccatatgacaagttttaaagtggtaattgaaataggttatcagatatagagttgttcacatcaagtagacttttaacagagtcagaatgaacctacccttaaaattttagagaaaaaaaatcgtcggttgcacagaatagctgctctagcttgcttaattatgccgggcatgttgtcactcctcttacttttgctgccttttcattactatttaatggaatgtccctgaacaataaggaagagcaaaacatagacattttgactacagtggatacttcctctaccccaaatgttatgttataaaagtactttttttgcccaggtactctattatatattttggttttctttgaattagacctcaatctccaggaagctctggagggaaaaaaaggaaccataaactaaagtaactggttttccaaataaatgtaaacttttttaaccttttattattatagaacatttcaaacatacataaaacatgaaaacagcctgcagccaaacttttctggaccttggcagctccagcaaatgagctggtcatcctaaccctggtttcctgagacaactacttttggggatgcttgcttgtatagggagatgatagatagatagatacatatcaaaaagaaacttgaaaaaggcttcgaacagaacttgccgatgttactcatccctcctcggtacagacattctgttagaacagatggttgtaatggggcagcatcactccctattcccattaaaaacatgaccattctgagatttcaggccccttcgaggaatttttctcaagaattccatacaaactgtcagaggaagaaatgtcgtcccaagactagtccctgtgtagtcttgatccctttacctgcttactgtaattttttttctctgactttccgccagtgtctaagggccatctgtacccctcccacccttccatgagccactgtataatccaaaaacacaccttccatttgctccctcacttgtctccttttacctcaacagtgttagtgtgtaaagaattgcctggggagggtagagggttttacaagtacagagtcccaagtcttttctcccctccccgttagtgggttggcatttattaataggcactgcaagattttgatgcaggtgtggggtagatatcactgtgaaaggctactaatgcatggtagtttcaccgaaagtacagtcttcaaggatccttataatctcctcattgccaaaatcagtaacatctataaccttgacaacaccctagcttgggctgttgcttctctggctacttgtttttccatcccagtttacccagattttagatggatactcctccaattctgcttaaagtccttacctgttcttgcccagttccctctagtcaacctcagtcactcccaaagattcttccccaatcccatatcttttgctcagacctctgtctctgggatttctttgttacctcatagtcagtagtcctaaaaacaaaattcttcatcttgcatctctatcgaccgaccattctttgtttctttttaagaaatgtaaccttcaccccaatcatcaaaatctctcattcctcaattgtcacaggttgtcacttctttccccctaaacctctcccatcattccttccttctttatactgcccttacaggtcctgatcctctgactcacccggacattcttagcagctgcctaatttcactccctgactctcatctccctcttccaatccttttcattgtgctagaacactatcttgctaattttaatatcctctgcattcagtgcctccacagattgccccctcactgacctttccaatttggccttgtgttacacactttcctcgctgcattcctacccagcatcttcacttgtcatatttctcaaatactcttcatgaccagatatttaaagtacctcatccatgaagacttcatcaacccccaaagtgcctccaatgcttccgtggtagcacagcataatggggtacatttcttagttgaacagtgaggagtcactgggattcttacagagtgtcttagggtctcctcttgatactctttccacatttcagttaaggaattttcttacatctttttttcttctaataacctttgcctggagtgtaagtaaattcatgatagagactgtcatttttaaaaaaaaaaacaaaccattttgcctttcacatgttattacctccatctttctgttatcttgtcagtgttgccacctaaatgattgaaaatgaccgagcatgcagtagaatgtagtgaagtttcctatttcatccattttttgcataagtgcattggtatctgtatatccatctgcccaagcaccagttgttgaaaagactattatttccccatgaatggtcctggtacccttgtcaaagaacagttgaccataaatataagactttctggattctcagtcttactccattgccctatatgtctgtcgttataccagcaccgcactgtcttgatggctgtagcttggtagtaagtttagatttgggatgtgcaagtcctccattttttttttttttttccccaaaatcattttgtctgttttgggtcccttgcattgcatatgaatttttatatgatcattgtgtcaattcctgcaaaacagctgggatcttgatagggatttagttgaattggtagataaatttgagaaataactgctattttaatggtgttaggttttctgttccatgactgtgggatgtctttgcatttgcttaggtctttatttcagtgatgttttagagatttcagtgtgcaagtcttgacgtctttaatttttttctaagtattttactgatgccactttaattatatgattattttctaatttttatttttgtattcatcactggtgttagaaataaaattaatttttgtatattgattttgtatattgtagcttttctaaaattctttttttgtcacttagtattttttgcatatgagatcatgcatctgtgaacagaaatacttttacttcttcctttccagtctagattcctattatttcattttcttgccttagtgtgctggctagcacctccagtacaatattggatagaagtgacaagagcagacatctttttcttgttcctgattttaaggggaaagcattcagtctttcaccattgagtatgatgttagctagctgtgggtttgcttcaagttgaggaaattcttttattaaacctagtttactgagtgttttttaatcaaaaaaaaaaaaaggaggggctgtgggttttgttaaatgcttcttctgtatcaagattttcatgttgttttgtcctttattaatatgttgtattaatggacttttgtatattgaattaactttgcattcctgggataatctcagttgtccatgctacataaaccttgttctatgctgctgga

SEQ ID NO: 655 - DNA, 8662 bp, Homo sapiens
  source 1..8662: mol_type = genomic DNA
gcccctggtggccgcggctgctgcagccgtaactgtcagtcctggctgagcgacggcgggagggttttgtcgcccgaggggacgcgagcgggcccggggcggggcgggacgtgcgaggcgtcgagatttgggcctcctaggagccaggctcttcgagccagccggggccccagacagggaagggcaggccctttccttcaaaggggagccctttctcggcgttttcaaggtttttggctctcttggggaagacatatttagccgtgtgcttgaggggaggtatggtgtcaagaaaacatagtcaccattattacgaaaagtaaaatatggaagagatgatccctaccatcaatcagcttacaactagaggcactgacaaatgtatacagatagctgtaatgtaaggttaaaaatctgtaagagcctgattttagaattcaccagctcctcagaagtttggcgaaatatgagttattaagcctacgctcagatcaaggtagcagctagactggtgtgacaacctgtttttaatcagtgactcaaagctgtgatcaccctgatgtcaccgaatggccacagcttgtaaaagagagttacagtggaggtaaaaggagtggcttgcaggatggagaagctgcaccagtgttattggaaatcaggagaacctcagtctgacgacattgaagctagccgaatgaagcgagcagctgcaaagcatctaatagaacgctactaccaccagttaactgagggctgtggaaatgaagcctgcacgaatgagttttgtgcttcctgtccaacttttcttcgtatggataataatgcagcagctattaaagccctcgagctttataagattaatgcaaaactctgtgatcctcatccctccaagaaaggagcaagctcagcttaccttgagaactcgaaaggtgcccccaacaactcctgctctgagataaaaatgaacaagaaaggcgctagaattgattttaaagatgtgacttacttaacagaagagaaggtatatgaaattcttgaattatgtagagaaagagaggattattcccctttaatccgtgttattggaagagttttttctagtgctgaggcattggtacagagcttccggaaagttaaacaacacaccaaggaagaactgaaatctcttcaagcaaaagatgaagacaaagatgaagatgaaaaggaaaaagctgcatgttctgctgctgctatggaagaagactcagaagcatcttcctcaaggataggtgatagctcacagggagacaacaatttgcaaaaattaggccctgatgatgtgtctgtggatattgatgccattagaagggtctacaccagattgctctctaatgaaaaaattgaaactgcctttctcaatgcacttgtatatttgtcacctaacgtggaatgtgacttgacgtatcacaatgtatactctcgagatcctaattatctgaatttgttcattatcgtaatggagaatagaaatctccacagtcctgaatatctggaaatggctttgccattattttgcaaagcgatgagcaagctaccccttgcagcccaaggaaaactgatcagactgtggtctaaatacaatgcagaccagattcggagaatgatggagacatttcagcaacttattacttataaagtcataagcaatgaatttaacagtcgaaatctagtgaatgatgatgatgccattgttgctgcttcgaagtgcttgaaaatggtttactatgcaaatgtagtgggaggggaagtggacacaaatcacaatgaagaagatgatgaagagcccatccctgagtccagcgagctgacacttcaggaacttttgggagaagaaagaagaaacaagaaaggtcctcgagtggaccccctggaaactgaacttggtgttaaaaccctggattgtcgaaaaccacttatcccttttgaagagtttattaatgaaccactgaatgaggttctagaaatggataaagattatacttttttcaaagtagaaacagagaacaaattctcttttatgacatgtccctttatattgaatgctgtcacaaagaatttgggattatattatgacaatagaattcgcatgtacagtgaacgaagaatcactgttctctacagcttagttcaaggacagcagttgaatccatatttgagactcaaagttagacgtgaccatatcatagatgatgcacttgtccggctagagatgatcgctatggaaaatcctgcagacttgaagaagcagttgtatgtggaatttgaaggagaacaaggagttgatgagggaggtgtttccaaagaattttttcagctggttgtggaggaaatcttcaatccagatattggtatgttcacatacgatgaatctacaaaattgttttggtttaatccatcttcttttgaaactgagggtcagtttactctgattggcatagtactgggtctggctatttacaataactgtatactggatgtacattttcccatggttgtctacaggaagctaatggggaaaaaaggaacttttcgtgacttgggagactctcacccagttctatatcagagtttaaaagatttattggagtatgaagggaatgtggaagatgacatgatgatcactttccagatatcacagacagatctttttggtaacccaatgatgtatgatctaaaggaaaatggtgataaaattccaattacaaatgaaaacaggaaggaatttgtcaatctttattctgactacattctcaataaatcagtagaaaaacagttcaaggcttttcggagaggttttcatatggtgaccaatgaatctcccttaaagtacttattcagaccagaagaaattgaattgcttatatgtggaagccggaatctagatttccaagcactagaagaaactacagaatatgacggtggctataccagggactctgttctgattagggagttctgggaaatcgttcattcatttacagatgaacagaaaagactcttcttgcagtttacaacgggcacagacagagcacctgtgggaggactaggaaaattaaagatgattatagccaaaaatggcccagacacagaaaggttacctacatctcatacttgctttaatgtgcttttacttccggaatactcaagcaaagaaaaacttaaagagagattgttgaaggccatcacgtatgccaaaggatttggcatgctgtaaaacaaaacaaaacaaaataaaacaaaaaaaaggaaggaaaaaaaaagaaaaaatttaaaaaattttaaaaatataacgagggataaatttttggtggtgatagtgtcccagtacaaaaaggctgtaagatagtcaaccacagtagtcacctatgtctgtgcctcccttctttattggggacatgtgggctggaacagcagatttcagctacatatatgaacaaatcctttattattattataattatttttttgcgtgaaagtgttacatattctttcacttgtatgtacagagaggtttttctgaatatttattttaagggttaaatcacttttgcttgtgtttattactgcttgaggttgagccttttgagtatttaaaaaatatataccaacagaactactctcccaaggaaaatattgccaccatttgtagaccacgtaaccttcaagtatgtgctacttttttgtccctgtatctaactcaaatcaggaactgtattttttttaatgatttgcttttgaaacttgaagtcttgaaaacagtgtgatgcaattactgctgttctagcccccaaagagttttctgtgcaaaatcttgagaatcaatcaataaagaaagatggaaggaagggagaaattggaatgttttaactgcagccctcagaactttagtaacagcacaacaaattaaaaacaaaaacaactcatgccacagtatgtcgtcttcatgtgtcttgcaatgaactgtttcagtagccaatcctctttcttagtatatgaaaggacagggatttttgttcttgttgttctcgttgttgttttaagtttactggggaaagtgcatttggccaaatgaaatggtagtcaagcctattgcaacaaagttaggaagtttgttgtttgtttattataaacaaaaagcatgtgaaagtgcacttaagatagagtttttattaattacttacttattacctagattttaaatagacaatccaaagtctccccttcgtgttgccatcatcttgttgaatcagccattttatcgaggcacgtgatcagtgttgcaacataatgaaaaagatggctactgtgccttgtgttacttaatcatacagtaagctgacctggaaatgaatgaaactattactcctaagaattacattgtatagccccacagattaaatttaattaattaattcaaaacatgttaaacgttactttcatgtactatggaaaagtacaagtaggtttacattactgatttccagaagtaagtagtttcccctttcctagtcttctgtgtatgtgatgttgttaatttcttttattgcattataaaataaaaggattatgtatttttaactaaggtgagacattgatatatccttttgctacaagctatagctaatgtgctgagcttgtgccttggtgattgattgattgattgactgattgttttaactgattactgtagatcaacctgatgatttgtttgtttgaaattggcaggaaaaatgcagctttcaaatcattggggggagaaaaaggatgtctttcaggattattttaattaatttttttcataattgagacagaactgtttgttatgtaccataatgctaaataaaactgtggcacttttcaccataatttaatttagtggaaaaagaagacaatgctttccatattgtgataaggtaacatggggtttttctgggccagcctttagaacactgttagggtacatacgctaccttgatgaaagggaccttcgtgcaactgtagtcatcttaaaggcttctcatccactgtgcttcttaatgtgtaattaaagtgaggagaaattaaatactctgagggcgttttatataataaattcgtgaagaaatgtgtgctcttcagttctcaagttttattattatggtatttattaaagttctacaattgtaataacgtatccatatgacaagttttaaagtggtaattgaaataggttatcagatatagagttgttcacatcaagtagacttttaacagagtcagaatgaacctacccttaaaattttagagaaaaaaaatcgtcggttgcacagaatagctgctctagcttgcttaattatgccgggcatgttgtcactcctcttacttttgctgccttttcattactatttaatggaatgtccctgaacaataaggaagagcaaaacatagacattttgactacagtggatacttcctctaccccaaatgttatgttataaaagtactttttttgcccaggtactctattatatattttggttttctttgaattagacctcaatctccaggaagctctggagggaaaaaaaggaaccataaactaaagtaactggttttccaaataaatgtaaacttttttaaccttttattattatagaacatttcaaacatacataaaacatgaaaacagcctgcagccaaacttttctggaccttggcagctccagcaaatgagctggtcatcctaaccctggtttcctgagacaactacttttggggatgcttgcttgtatagggagatgatagatagatagatacatatcaaaaagaaacttgaaaaaggcttcgaacagaacttgccgatgttactcatccctcctcggtacagacattctgttagaacagatggttgtaatggggcagcatcactccctattcccattaaaaacatgaccattctgagatttcaggccccttcgaggaatttttctcaagaattccatacaaactgtcagaggaagaaatgtcgtcccaagactagtccctgtgtagtcttgatccctttacctgcttactgtaattttttttctctgactttccgccagtgtctaagggccatctgtacccctcccacccttccatgagccactgtataatccaaaaacacaccttccatttgctccctcacttgtctccttttacctcaacagtgttagtgtgtaaagaattgcctggggagggtagagggttttacaagtacagagtcccaagtcttttctcccctccccgttagtgggttggcatttattaataggcactgcaagattttgatgcaggtgtggggtagatatcactgtgaaaggctactaatgcatggtagtttcaccgaaagtacagtcttcaaggatccttataatctcctcattgccaaaatcagtaacatctataaccttgacaacaccctagcttgggctgttgcttctctggctacttgtttttccatcccagtttacccagattttagatggatactcctccaattctgcttaaagtccttacctgttcttgcccagttccctctagtcaacctcagtcactcccaaagattcttccccaatcccatatcttttgctcagacctctgtctctgggatttctttgttacctcatagtcagtagtcctaaaaacaaaattcttcatcttgcatctctatcgaccgaccattctttgtttctttttaagaaatgtaaccttcaccccaatcatcaaaatctctcattcctcaattgtcacaggttgtcacttctttccccctaaacctctcccatcattccttccttctttatactgcccttacaggtcctgatcctctgactcacccggacattcttagcagctgcctaatttcactccctgactctcatctccctcttccaatccttttcattgtgctagaacactatcttgctaattttaatatcctctgcattcagtgcctccacagattgccccctcactgacctttccaatttggccttgtgttacacactttcctcgctgcattcctacccagcatcttcacttgtcatatttctcaaatactcttcatgaccagatatttaaagtacctcatccatgaagacttcatcaacccccaaagtgcctccaatgcttccgtggtagcacagcataatggggtacatttcttagttgaacagtgaggagtcactgggattcttacagagtgtcttagggtctcctcttgatactctttccacatttcagttaaggaattttcttacatctttttttcttctaataacctttgcctggagtgtaagtaaattcatgatagagactgtcatttttaaaaaaaaaaacaaaccattttgcctttcacatgttattacctccatctttctgttatcttgtcagtgttgccacctaaatgattgaaaatgaccgagcatgcagtagaatgtagtgaagtttcctatttcatccattttttgcataagtgcattggtatctgtatatccatctgcccaagcaccagttgttgaaaagactattatttccccatgaatggtcctggtacccttgtcaaagaacagttgaccataaatataagactttctggattctcagtcttactccattgccctatatgtctgtcgttataccagcaccgcactgtcttgatggctgtagcttggtagtaagtttagatttgggatgtgcaagtcctccattttttttttttttttccccaaaatcattttgtctgttttgggtcccttgcattgcatatgaatttttatatgatcattgtgtcaattcctgcaaaacagctgggatcttgatagggatttagttgaattggtagataaatttgagaaataactgctattttaatggtgttaggttttctgttccatgactgtgggatgtctttgcatttgcttaggtctttatttcagtgatgttttagagatttcagtgtgcaagtcttgacgtctttaatttttttctaagtattttactgatgccactttaattatatgattattttctaatttttatttttgtattcatcactggtgttagaaataaaattaatttttgtatattgattttgtatattgtagcttttctaaaattctttttttgtcacttagtattttttgcatatgagatcatgcatctgtgaacagaaatacttttacttcttcctttccagtctagattcctattatttcattttcttgccttagtgtgctggctagcacctccagtacaatattggatagaagtgacaagagcagacatctttttcttgttcctgattttaaggggaaagcattcagtctttcaccattgagtatgatgttagctagctgtgggtttgcttcaagttgaggaaattcttttattaaacctagtttactgagtgttttttaatcaaaaaaaaaaaaaggaggggctgtgggttttgttaaatgcttcttctgtatcaagattttcatgttgttttgtcctttattaatatgttgtattaatggacttttgtatattgaattaactttgcattcctgggataatctcagttgtccatgctacataaaccttgttctatgctgctgga

SEQ ID NO: 656 - DNA, 8477 bp, Homo sapiens
  source 1..8477: mol_type = genomic DNA
aggcgtcgagatttgggcctcctaggagccaggctcttcgagccagccggggccccagacagggaagggcaggccctttccttcaaaggggagccctttctcggcgttttcaaggtttttggctctcttggggaagacatatttagccgtgtgcttgaggggaggtatggtgtcaagaaaacatagtcaccattattacgaaaagtaaaatatggaagagatgatccctaccatcaatcagcttacaactagaggcactgacaaatgtatacagatagctgtaatgttaaaaatctgtaagagcctgattttagaattcaccagctcctcagaagtttggcgaaatatgagttattaagcctacgctcagatcaaggtagcagctagactggtgtgacaacctgtttttaatcagtgactcaaagctgtgatcaccctgatgtcaccgaatggccacagcttgtaaaagatcaggagaacctcagtctgacgacattgaagctagccgaatgaagcgagcagctgcaaagcatctaatagaacgctactaccaccagttaactgagggctgtggaaatgaagcctgcacgaatgagttttgtgcttcctgtccaacttttcttcgtatggataataatgcagcagctattaaagccctcgagctttataagattaatgcaaaactctgtgatcctcatccctccaagaaaggagcaagctcagcttaccttgagaactcgaaaggtgcccccaacaactcctgctctgagataaaaatgaacaagaaaggcgctagaattgattttaaagatgtgacttacttaacagaagagaaggtatatgaaattcttgaattatgtagagaaagagaggattattcccctttaatccgtgttattggaagagttttttctagtgctgaggcattggtacagagcttccggaaagttaaacaacacaccaaggaagaactgaaatctcttcaagcaaaagatgaagacaaagatgaagatgaaaaggaaaaagctgcatgttctgctgctgctatggaagaagactcagaagcatcttcctcaaggataggtgatagctcacagggagacaacaatttgcaaaaattaggccctgatgatgtgtctgtggatattgatgccattagaagggtctacaccagattgctctctaatgaaaaaattgaaactgcctttctcaatgcacttgtatatttgtcacctaacgtggaatgtgacttgacgtatcacaatgtatactctcgagatcctaattatctgaatttgttcattatcgtaatggagaatagaaatctccacagtcctgaatatctggaaatggctttgccattattttgcaaagcgatgagcaagctaccccttgcagcccaaggaaaactgatcagactgtggtctaaatacaatgcagaccagattcggagaatgatggagacatttcagcaacttattacttataaagtcataagcaatgaatttaacagtcgaaatctagtgaatgatgatgatgccattgttgctgcttcgaagtgcttgaaaatggtttactatgcaaatgtagtgggaggggaagtggacacaaatcacaatgaagaagatgatgaagagcccatccctgagtccagcgagctgacacttcaggaacttttgggagaagaaagaagaaacaagaaaggtcctcgagtggaccccctggaaactgaacttggtgttaaaaccctggattgtcgaaaaccacttatcccttttgaagagtttattaatgaaccactgaatgaggttctagaaatggataaagattatacttttttcaaagtagaaacagagaacaaattctcttttatgacatgtccctttatattgaatgctgtcacaaagaatttgggattatattatgacaatagaattcgcatgtacagtgaacgaagaatcactgttctctacagcttagttcaaggacagcagttgaatccatatttgagactcaaagttagacgtgaccatatcatagatgatgcacttgtccggctagagatgatcgctatggaaaatcctgcagacttgaagaagcagttgtatgtggaatttgaaggagaacaaggagttgatgagggaggtgtttccaaagaattttttcagctggttgtggaggaaatcttcaatccagatattggtatgttcacatacgatgaatctacaaaattgttttggtttaatccatcttcttttgaaactgagggtcagtttactctgattggcatagtactgggtctggctatttacaataactgtatactggatgtacattttcccatggttgtctacaggaagctaatggggaaaaaaggaacttttcgtgacttgggagactctcacccagttctatatcagagtttaaaagatttattggagtatgaagggaatgtggaagatgacatgatgatcactttccagatatcacagacagatctttttggtaacccaatgatgtatgatctaaaggaaaatggtgataaaattccaattacaaatgaaaacaggaaggaatttgtcaatctttattctgactacattctcaataaatcagtagaaaaacagttcaaggcttttcggagaggttttcatatggtgaccaatgaatctcccttaaagtacttattcagaccagaagaaattgaattgcttatatgtggaagccggaatctagatttccaagcactagaagaaactacagaatatgacggtggctataccagggactctgttctgattagggagttctgggaaatcgttcattcatttacagatgaacagaaaagactcttcttgcagtttacaacgggcacagacagagcacctgtgggaggactaggaaaattaaagatgattatagccaaaaatggcccagacacagaaaggttacctacatctcatacttgctttaatgtgcttttacttccggaatactcaagcaaagaaaaacttaaagagagattgttgaaggccatcacgtatgccaaaggatttggcatgctgtaaaacaaaacaaaacaaaataaaacaaaaaaaaggaaggaaaaaaaaagaaaaaatttaaaaaattttaaaaatataacgagggataaatttttggtggtgatagtgtcccagtacaaaaaggctgtaagatagtcaaccacagtagtcacctatgtctgtgcctcccttctttattggggacatgtgggctggaacagcagatttcagctacatatatgaacaaatcctttattattattataattatttttttgcgtgaaagtgttacatattctttcacttgtatgtacagagaggtttttctgaatatttattttaagggttaaatcacttttgcttgtgtttattactgcttgaggttgagccttttgagtatttaaaaaatatataccaacagaactactctcccaaggaaaatattgccaccatttgtagaccacgtaaccttcaagtatgtgctacttttttgtccctgtatctaactcaaatcaggaactgtattttttttaatgatttgcttttgaaacttgaagtcttgaaaacagtgtgatgcaattactgctgttctagcccccaaagagttttctgtgcaaaatcttgagaatcaatcaataaagaaagatggaaggaagggagaaattggaatgttttaactgcagccctcagaactttagtaacagcacaacaaattaaaaacaaaaacaactcatgccacagtatgtcgtcttcatgtgtcttgcaatgaactgtttcagtagccaatcctctttcttagtatatgaaaggacagggatttttgttcttgttgttctcgttgttgttttaagtttactggggaaagtgcatttggccaaatgaaatggtagtcaagcctattgcaacaaagttaggaagtttgttgtttgtttattataaacaaaaagcatgtgaaagtgcacttaagatagagtttttattaattacttacttattacctagattttaaatagacaatccaaagtctccccttcgtgttgccatcatcttgttgaatcagccattttatcgaggcacgtgatcagtgttgcaacataatgaaaaagatggctactgtgccttgtgttacttaatcatacagtaagctgacctggaaatgaatgaaactattactcctaagaattacattgtatagccccacagattaaatttaattaattaattcaaaacatgttaaacgttactttcatgtactatggaaaagtacaagtaggtttacattactgatttccagaagtaagtagtttcccctttcctagtcttctgtgtatgtgatgttgttaatttcttttattgcattataaaataaaaggattatgtatttttaactaaggtgagacattgatatatccttttgctacaagctatagctaatgtgctgagcttgtgccttggtgattgattgattgattgactgattgttttaactgattactgtagatcaacctgatgatttgtttgtttgaaattggcaggaaaaatgcagctttcaaatcattggggggagaaaaaggatgtctttcaggattattttaattaatttttttcataattgagacagaactgtttgttatgtaccataatgctaaataaaactgtggcacttttcaccataatttaatttagtggaaaaagaagacaatgctttccatattgtgataaggtaacatggggtttttctgggccagcctttagaacactgttagggtacatacgctaccttgatgaaagggaccttcgtgcaactgtagtcatcttaaaggcttctcatccactgtgcttcttaatgtgtaattaaagtgaggagaaattaaatactctgagggcgttttatataataaattcgtgaagaaatgtgtgctcttcagttctcaagttttattattatggtatttattaaagttctacaattgtaataacgtatccatatgacaagttttaaagtggtaattgaaataggttatcagatatagagttgttcacatcaagtagacttttaacagagtcagaatgaacctacccttaaaattttagagaaaaaaaatcgtcggttgcacagaatagctgctctagcttgcttaattatgccgggcatgttgtcactcctcttacttttgctgccttttcattactatttaatggaatgtccctgaacaataaggaagagcaaaacatagacattttgactacagtggatacttcctctaccccaaatgttatgttataaaagtactttttttgcccaggtactctattatatattttggttttctttgaattagacctcaatctccaggaagctctggagggaaaaaaaggaaccataaactaaagtaactggttttccaaataaatgtaaacttttttaaccttttattattatagaacatttcaaacatacataaaacatgaaaacagcctgcagccaaacttttctggaccttggcagctccagcaaatgagctggtcatcctaaccctggtttcctgagacaactacttttggggatgcttgcttgtatagggagatgatagatagatagatacatatcaaaaagaaacttgaaaaaggcttcgaacagaacttgccgatgttactcatccctcctcggtacagacattctgttagaacagatggttgtaatggggcagcatcactccctattcccattaaaaacatgaccattctgagatttcaggccccttcgaggaatttttctcaagaattccatacaaactgtcagaggaagaaatgtcgtcccaagactagtccctgtgtagtcttgatccctttacctgcttactgtaattttttttctctgactttccgccagtgtctaagggccatctgtacccctcccacccttccatgagccactgtataatccaaaaacacaccttccatttgctccctcacttgtctccttttacctcaacagtgttagtgtgtaaagaattgcctggggagggtagagggttttacaagtacagagtcccaagtcttttctcccctccccgttagtgggttggcatttattaataggcactgcaagattttgatgcaggtgtggggtagatatcactgtgaaaggctactaatgcatggtagtttcaccgaaagtacagtcttcaaggatccttataatctcctcattgccaaaatcagtaacatctataaccttgacaacaccctagcttgggctgttgcttctctggctacttgtttttccatcccagtttacccagattttagatggatactcctccaattctgcttaaagtccttacctgttcttgcccagttccctctagtcaacctcagtcactcccaaagattcttccccaatcccatatcttttgctcagacctctgtctctgggatttctttgttacctcatagtcagtagtcctaaaaacaaaattcttcatcttgcatctctatcgaccgaccattctttgtttctttttaagaaatgtaaccttcaccccaatcatcaaaatctctcattcctcaattgtcacaggttgtcacttctttccccctaaacctctcccatcattccttccttctttatactgcccttacaggtcctgatcctctgactcacccggacattcttagcagctgcctaatttcactccctgactctcatctccctcttccaatccttttcattgtgctagaacactatcttgctaattttaatatcctctgcattcagtgcctccacagattgccccctcactgacctttccaatttggccttgtgttacacactttcctcgctgcattcctacccagcatcttcacttgtcatatttctcaaatactcttcatgaccagatatttaaagtacctcatccatgaagacttcatcaacccccaaagtgcctccaatgcttccgtggtagcacagcataatggggtacatttcttagttgaacagtgaggagtcactgggattcttacagagtgtcttagggtctcctcttgatactctttccacatttcagttaaggaattttcttacatctttttttcttctaataacctttgcctggagtgtaagtaaattcatgatagagactgtcatttttaaaaaaaaaaacaaaccattttgcctttcacatgttattacctccatctttctgttatcttgtcagtgttgccacctaaatgattgaaaatgaccgagcatgcagtagaatgtagtgaagtttcctatttcatccattttttgcataagtgcattggtatctgtatatccatctgcccaagcaccagttgttgaaaagactattatttccccatgaatggtcctggtacccttgtcaaagaacagttgaccataaatataagactttctggattctcagtcttactccattgccctatatgtctgtcgttataccagcaccgcactgtcttgatggctgtagcttggtagtaagtttagatttgggatgtgcaagtcctccattttttttttttttttccccaaaatcattttgtctgttttgggtcccttgcattgcatatgaatttttatatgatcattgtgtcaattcctgcaaaacagctgggatcttgatagggatttagttgaattggtagataaatttgagaaataactgctattttaatggtgttaggttttctgttccatgactgtgggatgtctttgcatttgcttaggtctttatttcagtgatgttttagagatttcagtgtgcaagtcttgacgtctttaatttttttctaagtattttactgatgccactttaattatatgattattttctaatttttatttttgtattcatcactggtgttagaaataaaattaatttttgtatattgattttgtatattgtagcttttctaaaattctttttttgtcacttagtattttttgcatatgagatcatgcatctgtgaacagaaatacttttacttcttcctttccagtctagattcctattatttcattttcttgccttagtgtgctggctagcacctccagtacaatattggatagaagtgacaagagcagacatctttttcttgttcctgattttaaggggaaagcattcagtctttcaccattgagtatgatgttagctagctgtgggtttgcttcaagttgaggaaattcttttattaaacctagtttactgagtgttttttaatcaaaaaaaaaaaaaggaggggctgtgggttttgttaaatgcttcttctgtatcaagattttcatgttgttttgtcctttattaatatgttgtattaatggacttttgtatattgaattaactttgcattcctgggataatctcagttgtccatgctacataaaccttgttctatgctgctgga

SEQ ID NO: 657 - DNA, 9664 bp, Homo sapiens
  source 1..9664: mol_type = genomic DNA
tagagatggggtcttcctatgttgcccactttggtttgttagttttagtagtttataattcctttgtattattgtgaacaaataacagttattttgaaatagaagagtgctttctatttaaaattttgctttgatagggttctgtctactttctgagccttaccttcctgtgcattcccctttggtcagtaccatcttaccacacaggctgcttttagtttcttgagttatccatcttccttctatcttatagggctcaacctaaatattactcagggaagccttccttgagagtctttctttttgcactcattggtttggggcttctttatattatactgttaattgaattctgagtcgtgtttatctcaactgagattaggtaatttattttgagaacagtaaatgtttatcatctgtcattctttttttcatgcccacattcagttatttgtaagtgctgaatgtataagtgttcatctacagataaggatcagttcttttttccccaactagaaatgttactccagttgataataacagctcaaacggaaatataaggcagaggtgagagagtcacttgaggccacgaattggagaccagcctgggcaacaaagtgagaccttatccctatgaaaaataaaattagcccagcttgggaggctgaggtggggggattgcttgaaccctggagttccaggctgcagtgagttgttatcacaccactgcactccagccgcggtgacagaccctgtcccttaaaaaaaaaaaaattataaccagccacattgaaatattttgtaagacattaatagaagactaaatgttctcatatgtttactgtttgtgttaagtacgtatggtttttagaacaacagttttctatcaagtgtggtctggttcacttagaattagatggggtagattttttgaaaagcgttttgaagttaaattagaagctaatggttttttgtcactaaatcaaattttgttttatgcgtttaagtgctacatttatttgataggcaggtgaatgtaacagattaaacttgaaaataatgtagctatgattccttcaaggaaaaacccacctacctttagttcttttagtatattgcattataagtcttttgtgtgtgcatatatagcaggcataaattggcataattctgggtttaattttaggctaggcgctatggaagtttgaactctaattacagtgtaaaaataacccagaggaaaatttcagaataataaatcattgggactatatggtacagatgtccctgttttcagattgtagaattgttgaccagtaggaatgctttatgattaaaagccaggaaattaaagtaattctgatgatttggtatttctaaagattttcatagatgacagttgagaactactctcagatgagattcttccattgctgggtaaataccttaaattggaattactgggtcacatggttaaaaatctgtaagagcctgattttagaattcaccagctcctcagaagtttggcgaaatatgagttattaagcctacgctcagatcaaggtagcagctagactggtgtgacaacctgtttttaatcagtgactcaaagctgtgatcaccctgatgtcaccgaatggccacagcttgtaaaagatcaggagaacctcagtctgacgacattgaagctagccgaatgaagcgagcagctgcaaagcatctaatagaacgctactaccaccagttaactgagggctgtggaaatgaagcctgcacgaatgagttttgtgcttcctgtccaacttttcttcgtatggataataatgcagcagctattaaagccctcgagctttataagattaatgcaaaactctgtgatcctcatccctccaagaaaggagcaagctcagcttaccttgagaactcgaaaggtgcccccaacaactcctgctctgagataaaaatgaacaagaaaggcgctagaattgattttaaagatgtgacttacttaacagaagagaaggtatatgaaattcttgaattatgtagagaaagagaggattattcccctttaatccgtgttattggaagagttttttctagtgctgaggcattggtacagagcttccggaaagttaaacaacacaccaaggaagaactgaaatctcttcaagcaaaagatgaagacaaagatgaagatgaaaaggaaaaagctgcatgttctgctgctgctatggaagaagactcagaagcatcttcctcaaggataggtgatagctcacagggagacaacaatttgcaaaaattaggccctgatgatgtgtctgtggatattgatgccattagaagggtctacaccagattgctctctaatgaaaaaattgaaactgcctttctcaatgcacttgtatatttgtcacctaacgtggaatgtgacttgacgtatcacaatgtatactctcgagatcctaattatctgaatttgttcattatcgtaatggagaatagaaatctccacagtcctgaatatctggaaatggctttgccattattttgcaaagcgatgagcaagctaccccttgcagcccaaggaaaactgatcagactgtggtctaaatacaatgcagaccagattcggagaatgatggagacatttcagcaacttattacttataaagtcataagcaatgaatttaacagtcgaaatctagtgaatgatgatgatgccattgttgctgcttcgaagtgcttgaaaatggtttactatgcaaatgtagtgggaggggaagtggacacaaatcacaatgaagaagatgatgaagagcccatccctgagtccagcgagctgacacttcaggaacttttgggagaagaaagaagaaacaagaaaggtcctcgagtggaccccctggaaactgaacttggtgttaaaaccctggattgtcgaaaaccacttatcccttttgaagagtttattaatgaaccactgaatgaggttctagaaatggataaagattatacttttttcaaagtagaaacagagaacaaattctcttttatgacatgtccctttatattgaatgctgtcacaaagaatttgggattatattatgacaatagaattcgcatgtacagtgaacgaagaatcactgttctctacagcttagttcaaggacagcagttgaatccatatttgagactcaaagttagacgtgaccatatcatagatgatgcacttgtccggctagagatgatcgctatggaaaatcctgcagacttgaagaagcagttgtatgtggaatttgaaggagaacaaggagttgatgagggaggtgtttccaaagaattttttcagctggttgtggaggaaatcttcaatccagatattggtatgttcacatacgatgaatctacaaaattgttttggtttaatccatcttcttttgaaactgagggtcagtttactctgattggcatagtactgggtctggctatttacaataactgtatactggatgtacattttcccatggttgtctacaggaagctaatggggaaaaaaggaacttttcgtgacttgggagactctcacccagttctatatcagagtttaaaagatttattggagtatgaagggaatgtggaagatgacatgatgatcactttccagatatcacagacagatctttttggtaacccaatgatgtatgatctaaaggaaaatggtgataaaattccaattacaaatgaaaacaggaaggaatttgtcaatctttattctgactacattctcaataaatcagtagaaaaacagttcaaggcttttcggagaggttttcatatggtgaccaatgaatctcccttaaagtacttattcagaccagaagaaattgaattgcttatatgtggaagccggaatctagatttccaagcactagaagaaactacagaatatgacggtggctataccagggactctgttctgattagggagttctgggaaatcgttcattcatttacagatgaacagaaaagactcttcttgcagtttacaacgggcacagacagagcacctgtgggaggactaggaaaattaaagatgattatagccaaaaatggcccagacacagaaaggttacctacatctcatacttgctttaatgtgcttttacttccggaatactcaagcaaagaaaaacttaaagagagattgttgaaggccatcacgtatgccaaaggatttggcatgctgtaaaacaaaacaaaacaaaataaaacaaaaaaaaggaaggaaaaaaaaagaaaaaatttaaaaaattttaaaaatataacgagggataaatttttggtggtgatagtgtcccagtacaaaaaggctgtaagatagtcaaccacagtagtcacctatgtctgtgcctcccttctttattggggacatgtgggctggaacagcagatttcagctacatatatgaacaaatcctttattattattataattatttttttgcgtgaaagtgttacatattctttcacttgtatgtacagagaggtttttctgaatatttattttaagggttaaatcacttttgcttgtgtttattactgcttgaggttgagccttttgagtatttaaaaaatatataccaacagaactactctcccaaggaaaatattgccaccatttgtagaccacgtaaccttcaagtatgtgctacttttttgtccctgtatctaactcaaatcaggaactgtattttttttaatgatttgcttttgaaacttgaagtcttgaaaacagtgtgatgcaattactgctgttctagcccccaaagagttttctgtgcaaaatcttgagaatcaatcaataaagaaagatggaaggaagggagaaattggaatgttttaactgcagccctcagaactttagtaacagcacaacaaattaaaaacaaaaacaactcatgccacagtatgtcgtcttcatgtgtcttgcaatgaactgtttcagtagccaatcctctttcttagtatatgaaaggacagggatttttgttcttgttgttctcgttgttgttttaagtttactggggaaagtgcatttggccaaatgaaatggtagtcaagcctattgcaacaaagttaggaagtttgttgtttgtttattataaacaaaaagcatgtgaaagtgcacttaagatagagtttttattaattacttacttattacctagattttaaatagacaatccaaagtctccccttcgtgttgccatcatcttgttgaatcagccattttatcgaggcacgtgatcagtgttgcaacataatgaaaaagatggctactgtgccttgtgttacttaatcatacagtaagctgacctggaaatgaatgaaactattactcctaagaattacattgtatagccccacagattaaatttaattaattaattcaaaacatgttaaacgttactttcatgtactatggaaaagtacaagtaggtttacattactgatttccagaagtaagtagtttcccctttcctagtcttctgtgtatgtgatgttgttaatttcttttattgcattataaaataaaaggattatgtatttttaactaaggtgagacattgatatatccttttgctacaagctatagctaatgtgctgagcttgtgccttggtgattgattgattgattgactgattgttttaactgattactgtagatcaacctgatgatttgtttgtttgaaattggcaggaaaaatgcagctttcaaatcattggggggagaaaaaggatgtctttcaggattattttaattaatttttttcataattgagacagaactgtttgttatgtaccataatgctaaataaaactgtggcacttttcaccataatttaatttagtggaaaaagaagacaatgctttccatattgtgataaggtaacatggggtttttctgggccagcctttagaacactgttagggtacatacgctaccttgatgaaagggaccttcgtgcaactgtagtcatcttaaaggcttctcatccactgtgcttcttaatgtgtaattaaagtgaggagaaattaaatactctgagggcgttttatataataaattcgtgaagaaatgtgtgctcttcagttctcaagttttattattatggtatttattaaagttctacaattgtaataacgtatccatatgacaagttttaaagtggtaattgaaataggttatcagatatagagttgttcacatcaagtagacttttaacagagtcagaatgaacctacccttaaaattttagagaaaaaaaatcgtcggttgcacagaatagctgctctagcttgcttaattatgccgggcatgttgtcactcctcttacttttgctgccttttcattactatttaatggaatgtccctgaacaataaggaagagcaaaacatagacattttgactacagtggatacttcctctaccccaaatgttatgttataaaagtactttttttgcccaggtactctattatatattttggttttctttgaattagacctcaatctccaggaagctctggagggaaaaaaaggaaccataaactaaagtaactggttttccaaataaatgtaaacttttttaaccttttattattatagaacatttcaaacatacataaaacatgaaaacagcctgcagccaaacttttctggaccttggcagctccagcaaatgagctggtcatcctaaccctggtttcctgagacaactacttttggggatgcttgcttgtatagggagatgatagatagatagatacatatcaaaaagaaacttgaaaaaggcttcgaacagaacttgccgatgttactcatccctcctcggtacagacattctgttagaacagatggttgtaatggggcagcatcactccctattcccattaaaaacatgaccattctgagatttcaggccccttcgaggaatttttctcaagaattccatacaaactgtcagaggaagaaatgtcgtcccaagactagtccctgtgtagtcttgatccctttacctgcttactgtaattttttttctctgactttccgccagtgtctaagggccatctgtacccctcccacccttccatgagccactgtataatccaaaaacacaccttccatttgctccctcacttgtctccttttacctcaacagtgttagtgtgtaaagaattgcctggggagggtagagggttttacaagtacagagtcccaagtcttttctcccctccccgttagtgggttggcatttattaataggcactgcaagattttgatgcaggtgtggggtagatatcactgtgaaaggctactaatgcatggtagtttcaccgaaagtacagtcttcaaggatccttataatctcctcattgccaaaatcagtaacatctataaccttgacaacaccctagcttgggctgttgcttctctggctacttgtttttccatcccagtttacccagattttagatggatactcctccaattctgcttaaagtccttacctgttcttgcccagttccctctagtcaacctcagtcactcccaaagattcttccccaatcccatatcttttgctcagacctctgtctctgggatttctttgttacctcatagtcagtagtcctaaaaacaaaattcttcatcttgcatctctatcgaccgaccattctttgtttctttttaagaaatgtaaccttcaccccaatcatcaaaatctctcattcctcaattgtcacaggttgtcacttctttccccctaaacctctcccatcattccttccttctttatactgcccttacaggtcctgatcctctgactcacccggacattcttagcagctgcctaatttcactccctgactctcatctccctcttccaatccttttcattgtgctagaacactatcttgctaattttaatatcctctgcattcagtgcctccacagattgccccctcactgacctttccaatttggccttgtgttacacactttcctcgctgcattcctacccagcatcttcacttgtcatatttctcaaatactcttcatgaccagatatttaaagtacctcatccatgaagacttcatcaacccccaaagtgcctccaatgcttccgtggtagcacagcataatggggtacatttcttagttgaacagtgaggagtcactgggattcttacagagtgtcttagggtctcctcttgatactctttccacatttcagttaaggaattttcttacatctttttttcttctaataacctttgcctggagtgtaagtaaattcatgatagagactgtcatttttaaaaaaaaaaacaaaccattttgcctttcacatgttattacctccatctttctgttatcttgtcagtgttgccacctaaatgattgaaaatgaccgagcatgcagtagaatgtagtgaagtttcctatttcatccattttttgcataagtgcattggtatctgtatatccatctgcccaagcaccagttgttgaaaagactattatttccccatgaatggtcctggtacccttgtcaaagaacagttgaccataaatataagactttctggattctcagtcttactccattgccctatatgtctgtcgttataccagcaccgcactgtcttgatggctgtagcttggtagtaagtttagatttgggatgtgcaagtcctccattttttttttttttttccccaaaatcattttgtctgttttgggtcccttgcattgcatatgaatttttatatgatcattgtgtcaattcctgcaaaacagctgggatcttgatagggatttagttgaattggtagataaatttgagaaataactgctattttaatggtgttaggttttctgttccatgactgtgggatgtctttgcatttgcttaggtctttatttcagtgatgttttagagatttcagtgtgcaagtcttgacgtctttaatttttttctaagtattttactgatgccactttaattatatgattattttctaatttttatttttgtattcatcactggtgttagaaataaaattaatttttgtatattgattttgtatattgtagcttttctaaaattctttttttgtcacttagtattttttgcatatgagatcatgcatctgtgaacagaaatacttttacttcttcctttccagtctagattcctattatttcattttcttgccttagtgtgctggctagcacctccagtacaatattggatagaagtgacaagagcagacatctttttcttgttcctgattttaaggggaaagcattcagtctttcaccattgagtatgatgttagctagctgtgggtttgcttcaagttgaggaaattcttttattaaacctagtttactgagtgttttttaatcaaaaaaaaaaaaaggaggggctgtgggttttgttaaatgcttcttctgtatcaagattttcatgttgttttgtcctttattaatatgttgtattaatggacttttgtatattgaattaactttgcattcctgggataatctcagttgtccatgctacataaaccttgttctatgctgctgga

SEQ ID NO: 658 - DNA, 9862 bp, Homo sapiens
  source 1..9862: mol_type = genomic DNA
tagagatggggtcttcctatgttgcccactttggtttgttagttttagtagtttataattcctttgtattattgtgaacaaataacagttattttgaaatagaagagtgctttctatttaaaattttgctttgatagggttctgtctactttctgagccttaccttcctgtgcattcccctttggtcagtaccatcttaccacacaggctgcttttagtttcttgagttatccatcttccttctatcttatagggctcaacctaaatattactcagggaagccttccttgagagtctttctttttgcactcattggtttggggcttctttatattatactgttaattgaattctgagtcgtgtttatctcaactgagattaggtaatttattttgagaacagtaaatgtttatcatctgtcattctttttttcatgcccacattcagttatttgtaagtgctgaatgtataagtgttcatctacagataaggatcagttcttttttccccaactagaaatgttactccagttgataataacagctcaaacggaaatataaggcagaggtgagagagtcacttgaggccacgaattggagaccagcctgggcaacaaagtgagaccttatccctatgaaaaataaaattagcccagcttgggaggctgaggtggggggattgcttgaaccctggagttccaggctgcagtgagttgttatcacaccactgcactccagccgcggtgacagaccctgtcccttaaaaaaaaaaaaattataaccagccacattgaaatattttgtaagacattaatagaagactaaatgttctcatatgtttactgtttgtgttaagtacgtatggtttttagaacaacagttttctatcaagtgtggtctggttcacttagaattagatggggtagattttttgaaaagcgttttgaagttaaattagaagctaatggttttttgtcactaaatcaaattttgttttatgcgtttaagtgctacatttatttgataggcaggtgaatgtaacagattaaacttgaaaataatgtagctatgattccttcaaggaaaaacccacctacctttagttcttttagtatattgcattataagtcttttgtgtgtgcatatatagcaggcataaattggcataattctgggtttaattttaggctaggcgctatggaagtttgaactctaattacagtgtaaaaataacccagaggaaaatttcagaataataaatcattgggactatatggtacagatgtccctgttttcagattgtagaattgttgaccagtaggaatgctttatgattaaaagccaggaaattaaagtaattctgatgatttggtatttctaaagattttcatagatgacagttgagaactactctcagatgagattcttccattgctgggtaaataccttaaattggaattactgggtcacatgaggggaggtatggtgtcaagaaaacatagtcaccattattacgaaaagtaaaatatggaagagatgatccctaccatcaatcagcttacaactagaggcactgacaaatgtatacagatagctgtaatgtaaggttaaaaatctgtaagagcctgattttagaattcaccagctcctcagaagtttggcgaaatatgagttattaagcctacgctcagatcaaggtagcagctagactggtgtgacaacctgtttttaatcagtgactcaaagctgtgatcaccctgatgtcaccgaatggccacagcttgtaaaagagagttacagtggaggtaaaaggagtggcttgcaggatggagaagctgcaccagtgttattggaaatcaggagaacctcagtctgacgacattgaagctagccgaatgaagcgagcagctgcaaagcatctaatagaacgctactaccaccagttaactgagggctgtggaaatgaagcctgcacgaatgagttttgtgcttcctgtccaacttttcttcgtatggataataatgcagcagctattaaagccctcgagctttataagattaatgcaaaactctgtgatcctcatccctccaagaaaggagcaagctcagcttaccttgagaactcgaaaggtgcccccaacaactcctgctctgagataaaaatgaacaagaaaggcgctagaattgattttaaagatgtgacttacttaacagaagagaaggtatatgaaattcttgaattatgtagagaaagagaggattattcccctttaatccgtgttattggaagagttttttctagtgctgaggcattggtacagagcttccggaaagttaaacaacacaccaaggaagaactgaaatctcttcaagcaaaagatgaagacaaagatgaagatgaaaaggaaaaagctgcatgttctgctgctgctatggaagaagactcagaagcatcttcctcaaggataggtgatagctcacagggagacaacaatttgcaaaaattaggccctgatgatgtgtctgtggatattgatgccattagaagggtctacaccagattgctctctaatgaaaaaattgaaactgcctttctcaatgcacttgtatatttgtcacctaacgtggaatgtgacttgacgtatcacaatgtatactctcgagatcctaattatctgaatttgttcattatcgtaatggagaatagaaatctccacagtcctgaatatctggaaatggctttgccattattttgcaaagcgatgagcaagctaccccttgcagcccaaggaaaactgatcagactgtggtctaaatacaatgcagaccagattcggagaatgatggagacatttcagcaacttattacttataaagtcataagcaatgaatttaacagtcgaaatctagtgaatgatgatgatgccattgttgctgcttcgaagtgcttgaaaatggtttactatgcaaatgtagtgggaggggaagtggacacaaatcacaatgaagaagatgatgaagagcccatccctgagtccagcgagctgacacttcaggaacttttgggagaagaaagaagaaacaagaaaggtcctcgagtggaccccctggaaactgaacttggtgttaaaaccctggattgtcgaaaaccacttatcccttttgaagagtttattaatgaaccactgaatgaggttctagaaatggataaagattatacttttttcaaagtagaaacagagaacaaattctcttttatgacatgtccctttatattgaatgctgtcacaaagaatttgggattatattatgacaatagaattcgcatgtacagtgaacgaagaatcactgttctctacagcttagttcaaggacagcagttgaatccatatttgagactcaaagttagacgtgaccatatcatagatgatgcacttgtccggctagagatgatcgctatggaaaatcctgcagacttgaagaagcagttgtatgtggaatttgaaggagaacaaggagttgatgagggaggtgtttccaaagaattttttcagctggttgtggaggaaatcttcaatccagatattggtatgttcacatacgatgaatctacaaaattgttttggtttaatccatcttcttttgaaactgagggtcagtttactctgattggcatagtactgggtctggctatttacaataactgtatactggatgtacattttcccatggttgtctacaggaagctaatggggaaaaaaggaacttttcgtgacttgggagactctcacccagttctatatcagagtttaaaagatttattggagtatgaagggaatgtggaagatgacatgatgatcactttccagatatcacagacagatctttttggtaacccaatgatgtatgatctaaaggaaaatggtgataaaattccaattacaaatgaaaacaggaaggaatttgtcaatctttattctgactacattctcaataaatcagtagaaaaacagttcaaggcttttcggagaggttttcatatggtgaccaatgaatctcccttaaagtacttattcagaccagaagaaattgaattgcttatatgtggaagccggaatctagatttccaagcactagaagaaactacagaatatgacggtggctataccagggactctgttctgattagggagttctgggaaatcgttcattcatttacagatgaacagaaaagactcttcttgcagtttacaacgggcacagacagagcacctgtgggaggactaggaaaattaaagatgattatagccaaaaatggcccagacacagaaaggttacctacatctcatacttgctttaatgtgcttttacttccggaatactcaagcaaagaaaaacttaaagagagattgttgaaggccatcacgtatgccaaaggatttggcatgctgtaaaacaaaacaaaacaaaataaaacaaaaaaaaggaaggaaaaaaaaagaaaaaatttaaaaaattttaaaaatataacgagggataaatttttggtggtgatagtgtcccagtacaaaaaggctgtaagatagtcaaccacagtagtcacctatgtctgtgcctcccttctttattggggacatgtgggctggaacagcagatttcagctacatatatgaacaaatcctttattattattataattatttttttgcgtgaaagtgttacatattctttcacttgtatgtacagagaggtttttctgaatatttattttaagggttaaatcacttttgcttgtgtttattactgcttgaggttgagccttttgagtatttaaaaaatatataccaacagaactactctcccaaggaaaatattgccaccatttgtagaccacgtaaccttcaagtatgtgctacttttttgtccctgtatctaactcaaatcaggaactgtattttttttaatgatttgcttttgaaacttgaagtcttgaaaacagtgtgatgcaattactgctgttctagcccccaaagagttttctgtgcaaaatcttgagaatcaatcaataaagaaagatggaaggaagggagaaattggaatgttttaactgcagccctcagaactttagtaacagcacaacaaattaaaaacaaaaacaactcatgccacagtatgtcgtcttcatgtgtcttgcaatgaactgtttcagtagccaatcctctttcttagtatatgaaaggacagggatttttgttcttgttgttctcgttgttgttttaagtttactggggaaagtgcatttggccaaatgaaatggtagtcaagcctattgcaacaaagttaggaagtttgttgtttgtttattataaacaaaaagcatgtgaaagtgcacttaagatagagtttttattaattacttacttattacctagattttaaatagacaatccaaagtctccccttcgtgttgccatcatcttgttgaatcagccattttatcgaggcacgtgatcagtgttgcaacataatgaaaaagatggctactgtgccttgtgttacttaatcatacagtaagctgacctggaaatgaatgaaactattactcctaagaattacattgtatagccccacagattaaatttaattaattaattcaaaacatgttaaacgttactttcatgtactatggaaaagtacaagtaggtttacattactgatttccagaagtaagtagtttcccctttcctagtcttctgtgtatgtgatgttgttaatttcttttattgcattataaaataaaaggattatgtatttttaactaaggtgagacattgatatatccttttgctacaagctatagctaatgtgctgagcttgtgccttggtgattgattgattgattgactgattgttttaactgattactgtagatcaacctgatgatttgtttgtttgaaattggcaggaaaaatgcagctttcaaatcattggggggagaaaaaggatgtctttcaggattattttaattaatttttttcataattgagacagaactgtttgttatgtaccataatgctaaataaaactgtggcacttttcaccataatttaatttagtggaaaaagaagacaatgctttccatattgtgataaggtaacatggggtttttctgggccagcctttagaacactgttagggtacatacgctaccttgatgaaagggaccttcgtgcaactgtagtcatcttaaaggcttctcatccactgtgcttcttaatgtgtaattaaagtgaggagaaattaaatactctgagggcgttttatataataaattcgtgaagaaatgtgtgctcttcagttctcaagttttattattatggtatttattaaagttctacaattgtaataacgtatccatatgacaagttttaaagtggtaattgaaataggttatcagatatagagttgttcacatcaagtagacttttaacagagtcagaatgaacctacccttaaaattttagagaaaaaaaatcgtcggttgcacagaatagctgctctagcttgcttaattatgccgggcatgttgtcactcctcttacttttgctgccttttcattactatttaatggaatgtccctgaacaataaggaagagcaaaacatagacattttgactacagtggatacttcctctaccccaaatgttatgttataaaagtactttttttgcccaggtactctattatatattttggttttctttgaattagacctcaatctccaggaagctctggagggaaaaaaaggaaccataaactaaagtaactggttttccaaataaatgtaaacttttttaaccttttattattatagaacatttcaaacatacataaaacatgaaaacagcctgcagccaaacttttctggaccttggcagctccagcaaatgagctggtcatcctaaccctggtttcctgagacaactacttttggggatgcttgcttgtatagggagatgatagatagatagatacatatcaaaaagaaacttgaaaaaggcttcgaacagaacttgccgatgttactcatccctcctcggtacagacattctgttagaacagatggttgtaatggggcagcatcactccctattcccattaaaaacatgaccattctgagatttcaggccccttcgaggaatttttctcaagaattccatacaaactgtcagaggaagaaatgtcgtcccaagactagtccctgtgtagtcttgatccctttacctgcttactgtaattttttttctctgactttccgccagtgtctaagggccatctgtacccctcccacccttccatgagccactgtataatccaaaaacacaccttccatttgctccctcacttgtctccttttacctcaacagtgttagtgtgtaaagaattgcctggggagggtagagggttttacaagtacagagtcccaagtcttttctcccctccccgttagtgggttggcatttattaataggcactgcaagattttgatgcaggtgtggggtagatatcactgtgaaaggctactaatgcatggtagtttcaccgaaagtacagtcttcaaggatccttataatctcctcattgccaaaatcagtaacatctataaccttgacaacaccctagcttgggctgttgcttctctggctacttgtttttccatcccagtttacccagattttagatggatactcctccaattctgcttaaagtccttacctgttcttgcccagttccctctagtcaacctcagtcactcccaaagattcttccccaatcccatatcttttgctcagacctctgtctctgggatttctttgttacctcatagtcagtagtcctaaaaacaaaattcttcatcttgcatctctatcgaccgaccattctttgtttctttttaagaaatgtaaccttcaccccaatcatcaaaatctctcattcctcaattgtcacaggttgtcacttctttccccctaaacctctcccatcattccttccttctttatactgcccttacaggtcctgatcctctgactcacccggacattcttagcagctgcctaatttcactccctgactctcatctccctcttccaatccttttcattgtgctagaacactatcttgctaattttaatatcctctgcattcagtgcctccacagattgccccctcactgacctttccaatttggccttgtgttacacactttcctcgctgcattcctacccagcatcttcacttgtcatatttctcaaatactcttcatgaccagatatttaaagtacctcatccatgaagacttcatcaacccccaaagtgcctccaatgcttccgtggtagcacagcataatggggtacatttcttagttgaacagtgaggagtcactgggattcttacagagtgtcttagggtctcctcttgatactctttccacatttcagttaaggaattttcttacatctttttttcttctaataacctttgcctggagtgtaagtaaattcatgatagagactgtcatttttaaaaaaaaaaacaaaccattttgcctttcacatgttattacctccatctttctgttatcttgtcagtgttgccacctaaatgattgaaaatgaccgagcatgcagtagaatgtagtgaagtttcctatttcatccattttttgcataagtgcattggtatctgtatatccatctgcccaagcaccagttgttgaaaagactattatttccccatgaatggtcctggtacccttgtcaaagaacagttgaccataaatataagactttctggattctcagtcttactccattgccctatatgtctgtcgttataccagcaccgcactgtcttgatggctgtagcttggtagtaagtttagatttgggatgtgcaagtcctccattttttttttttttttccccaaaatcattttgtctgttttgggtcccttgcattgcatatgaatttttatatgatcattgtgtcaattcctgcaaaacagctgggatcttgatagggatttagttgaattggtagataaatttgagaaataactgctattttaatggtgttaggttttctgttccatgactgtgggatgtctttgcatttgcttaggtctttatttcagtgatgttttagagatttcagtgtgcaagtcttgacgtctttaatttttttctaagtattttactgatgccactttaattatatgattattttctaatttttatttttgtattcatcactggtgttagaaataaaattaatttttgtatattgattttgtatattgtagcttttctaaaattctttttttgtcacttagtattttttgcatatgagatcatgcatctgtgaacagaaatacttttacttcttcctttccagtctagattcctattatttcattttcttgccttagtgtgctggctagcacctccagtacaatattggatagaagtgacaagagcagacatctttttcttgttcctgattttaaggggaaagcattcagtctttcaccattgagtatgatgttagctagctgtgggtttgcttcaagttgaggaaattcttttattaaacctagtttactgagtgttttttaatcaaaaaaaaaaaaaggaggggctgtgggttttgttaaatgcttcttctgtatcaagattttcatgttgttttgtcctttattaatatgttgtattaatggacttttgtatattgaattaactttgcattcctgggataatctcagttgtccatgctacataaaccttgttctatgctgctgga

SEQ ID NO: 659 - DNA, 8108 bp, Homo sapiens
  source 1..8108: mol_type = genomic DNA
ggtaaataccttaaattggaattactgggtcacatggttaaaaatctgtaagagcctgattttagaattcaccagctcctcagaagtttggcgaaatatgatcaggagaacctcagtctgacgacattgaagctagccgaatgaagcgagcagctgcaaagcatctaatagaacgctactaccaccagttaactgagggctgtggaaatgaagcctgcacgaatgagttttgtgcttcctgtccaacttttcttcgtatggataataatgcagcagctattaaagccctcgagctttataagattaatgcaaaactctgtgatcctcatccctccaagaaaggagcaagctcagcttaccttgagaactcgaaaggtgcccccaacaactcctgctctgagataaaaatgaacaagaaaggcgctagaattgattttaaagatgtgacttacttaacagaagagaaggtatatgaaattcttgaattatgtagagaaagagaggattattcccctttaatccgtgttattggaagagttttttctagtgctgaggcattggtacagagcttccggaaagttaaacaacacaccaaggaagaactgaaatctcttcaagcaaaagatgaagacaaagatgaagatgaaaaggaaaaagctgcatgttctgctgctgctatggaagaagactcagaagcatcttcctcaaggataggtgatagctcacagggagacaacaatttgcaaaaattaggccctgatgatgtgtctgtggatattgatgccattagaagggtctacaccagattgctctctaatgaaaaaattgaaactgcctttctcaatgcacttgtatatttgtcacctaacgtggaatgtgacttgacgtatcacaatgtatactctcgagatcctaattatctgaatttgttcattatcgtaatggagaatagaaatctccacagtcctgaatatctggaaatggctttgccattattttgcaaagcgatgagcaagctaccccttgcagcccaaggaaaactgatcagactgtggtctaaatacaatgcagaccagattcggagaatgatggagacatttcagcaacttattacttataaagtcataagcaatgaatttaacagtcgaaatctagtgaatgatgatgatgccattgttgctgcttcgaagtgcttgaaaatggtttactatgcaaatgtagtgggaggggaagtggacacaaatcacaatgaagaagatgatgaagagcccatccctgagtccagcgagctgacacttcaggaacttttgggagaagaaagaagaaacaagaaaggtcctcgagtggaccccctggaaactgaacttggtgttaaaaccctggattgtcgaaaaccacttatcccttttgaagagtttattaatgaaccactgaatgaggttctagaaatggataaagattatacttttttcaaagtagaaacagagaacaaattctcttttatgacatgtccctttatattgaatgctgtcacaaagaatttgggattatattatgacaatagaattcgcatgtacagtgaacgaagaatcactgttctctacagcttagttcaaggacagcagttgaatccatatttgagactcaaagttagacgtgaccatatcatagatgatgcacttgtccggctagagatgatcgctatggaaaatcctgcagacttgaagaagcagttgtatgtggaatttgaaggagaacaaggagttgatgagggaggtgtttccaaagaattttttcagctggttgtggaggaaatcttcaatccagatattggtatgttcacatacgatgaatctacaaaattgttttggtttaatccatcttcttttgaaactgagggtcagtttactctgattggcatagtactgggtctggctatttacaataactgtatactggatgtacattttcccatggttgtctacaggaagctaatggggaaaaaaggaacttttcgtgacttgggagactctcacccagttctatatcagagtttaaaagatttattggagtatgaagggaatgtggaagatgacatgatgatcactttccagatatcacagacagatctttttggtaacccaatgatgtatgatctaaaggaaaatggtgataaaattccaattacaaatgaaaacaggaaggaatttgtcaatctttattctgactacattctcaataaatcagtagaaaaacagttcaaggcttttcggagaggttttcatatggtgaccaatgaatctcccttaaagtacttattcagaccagaagaaattgaattgcttatatgtggaagccggaatctagatttccaagcactagaagaaactacagaatatgacggtggctataccagggactctgttctgattagggagttctgggaaatcgttcattcatttacagatgaacagaaaagactcttcttgcagtttacaacgggcacagacagagcacctgtgggaggactaggaaaattaaagatgattatagccaaaaatggcccagacacagaaaggttacctacatctcatacttgctttaatgtgcttttacttccggaatactcaagcaaagaaaaacttaaagagagattgttgaaggccatcacgtatgccaaaggatttggcatgctgtaaaacaaaacaaaacaaaataaaacaaaaaaaaggaaggaaaaaaaaagaaaaaatttaaaaaattttaaaaatataacgagggataaatttttggtggtgatagtgtcccagtacaaaaaggctgtaagatagtcaaccacagtagtcacctatgtctgtgcctcccttctttattggggacatgtgggctggaacagcagatttcagctacatatatgaacaaatcctttattattattataattatttttttgcgtgaaagtgttacatattctttcacttgtatgtacagagaggtttttctgaatatttattttaagggttaaatcacttttgcttgtgtttattactgcttgaggttgagccttttgagtatttaaaaaatatataccaacagaactactctcccaaggaaaatattgccaccatttgtagaccacgtaaccttcaagtatgtgctacttttttgtccctgtatctaactcaaatcaggaactgtattttttttaatgatttgcttttgaaacttgaagtcttgaaaacagtgtgatgcaattactgctgttctagcccccaaagagttttctgtgcaaaatcttgagaatcaatcaataaagaaagatggaaggaagggagaaattggaatgttttaactgcagccctcagaactttagtaacagcacaacaaattaaaaacaaaaacaactcatgccacagtatgtcgtcttcatgtgtcttgcaatgaactgtttcagtagccaatcctctttcttagtatatgaaaggacagggatttttgttcttgttgttctcgttgttgttttaagtttactggggaaagtgcatttggccaaatgaaatggtagtcaagcctattgcaacaaagttaggaagtttgttgtttgtttattataaacaaaaagcatgtgaaagtgcacttaagatagagtttttattaattacttacttattacctagattttaaatagacaatccaaagtctccccttcgtgttgccatcatcttgttgaatcagccattttatcgaggcacgtgatcagtgttgcaacataatgaaaaagatggctactgtgccttgtgttacttaatcatacagtaagctgacctggaaatgaatgaaactattactcctaagaattacattgtatagccccacagattaaatttaattaattaattcaaaacatgttaaacgttactttcatgtactatggaaaagtacaagtaggtttacattactgatttccagaagtaagtagtttcccctttcctagtcttctgtgtatgtgatgttgttaatttcttttattgcattataaaataaaaggattatgtatttttaactaaggtgagacattgatatatccttttgctacaagctatagctaatgtgctgagcttgtgccttggtgattgattgattgattgactgattgttttaactgattactgtagatcaacctgatgatttgtttgtttgaaattggcaggaaaaatgcagctttcaaatcattggggggagaaaaaggatgtctttcaggattattttaattaatttttttcataattgagacagaactgtttgttatgtaccataatgctaaataaaactgtggcacttttcaccataatttaatttagtggaaaaagaagacaatgctttccatattgtgataaggtaacatggggtttttctgggccagcctttagaacactgttagggtacatacgctaccttgatgaaagggaccttcgtgcaactgtagtcatcttaaaggcttctcatccactgtgcttcttaatgtgtaattaaagtgaggagaaattaaatactctgagggcgttttatataataaattcgtgaagaaatgtgtgctcttcagttctcaagttttattattatggtatttattaaagttctacaattgtaataacgtatccatatgacaagttttaaagtggtaattgaaataggttatcagatatagagttgttcacatcaagtagacttttaacagagtcagaatgaacctacccttaaaattttagagaaaaaaaatcgtcggttgcacagaatagctgctctagcttgcttaattatgccgggcatgttgtcactcctcttacttttgctgccttttcattactatttaatggaatgtccctgaacaataaggaagagcaaaacatagacattttgactacagtggatacttcctctaccccaaatgttatgttataaaagtactttttttgcccaggtactctattatatattttggttttctttgaattagacctcaatctccaggaagctctggagggaaaaaaaggaaccataaactaaagtaactggttttccaaataaatgtaaacttttttaaccttttattattatagaacatttcaaacatacataaaacatgaaaacagcctgcagccaaacttttctggaccttggcagctccagcaaatgagctggtcatcctaaccctggtttcctgagacaactacttttggggatgcttgcttgtatagggagatgatagatagatagatacatatcaaaaagaaacttgaaaaaggcttcgaacagaacttgccgatgttactcatccctcctcggtacagacattctgttagaacagatggttgtaatggggcagcatcactccctattcccattaaaaacatgaccattctgagatttcaggccccttcgaggaatttttctcaagaattccatacaaactgtcagaggaagaaatgtcgtcccaagactagtccctgtgtagtcttgatccctttacctgcttactgtaattttttttctctgactttccgccagtgtctaagggccatctgtacccctcccacccttccatgagccactgtataatccaaaaacacaccttccatttgctccctcacttgtctccttttacctcaacagtgttagtgtgtaaagaattgcctggggagggtagagggttttacaagtacagagtcccaagtcttttctcccctccccgttagtgggttggcatttattaataggcactgcaagattttgatgcaggtgtggggtagatatcactgtgaaaggctactaatgcatggtagtttcaccgaaagtacagtcttcaaggatccttataatctcctcattgccaaaatcagtaacatctataaccttgacaacaccctagcttgggctgttgcttctctggctacttgtttttccatcccagtttacccagattttagatggatactcctccaattctgcttaaagtccttacctgttcttgcccagttccctctagtcaacctcagtcactcccaaagattcttccccaatcccatatcttttgctcagacctctgtctctgggatttctttgttacctcatagtcagtagtcctaaaaacaaaattcttcatcttgcatctctatcgaccgaccattctttgtttctttttaagaaatgtaaccttcaccccaatcatcaaaatctctcattcctcaattgtcacaggttgtcacttctttccccctaaacctctcccatcattccttccttctttatactgcccttacaggtcctgatcctctgactcacccggacattcttagcagctgcctaatttcactccctgactctcatctccctcttccaatccttttcattgtgctagaacactatcttgctaattttaatatcctctgcattcagtgcctccacagattgccccctcactgacctttccaatttggccttgtgttacacactttcctcgctgcattcctacccagcatcttcacttgtcatatttctcaaatactcttcatgaccagatatttaaagtacctcatccatgaagacttcatcaacccccaaagtgcctccaatgcttccgtggtagcacagcataatggggtacatttcttagttgaacagtgaggagtcactgggattcttacagagtgtcttagggtctcctcttgatactctttccacatttcagttaaggaattttcttacatctttttttcttctaataacctttgcctggagtgtaagtaaattcatgatagagactgtcatttttaaaaaaaaaaacaaaccattttgcctttcacatgttattacctccatctttctgttatcttgtcagtgttgccacctaaatgattgaaaatgaccgagcatgcagtagaatgtagtgaagtttcctatttcatccattttttgcataagtgcattggtatctgtatatccatctgcccaagcaccagttgttgaaaagactattatttccccatgaatggtcctggtacccttgtcaaagaacagttgaccataaatataagactttctggattctcagtcttactccattgccctatatgtctgtcgttataccagcaccgcactgtcttgatggctgtagcttggtagtaagtttagatttgggatgtgcaagtcctccattttttttttttttttccccaaaatcattttgtctgttttgggtcccttgcattgcatatgaatttttatatgatcattgtgtcaattcctgcaaaacagctgggatcttgatagggatttagttgaattggtagataaatttgagaaataactgctattttaatggtgttaggttttctgttccatgactgtgggatgtctttgcatttgcttaggtctttatttcagtgatgttttagagatttcagtgtgcaagtcttgacgtctttaatttttttctaagtattttactgatgccactttaattatatgattattttctaatttttatttttgtattcatcactggtgttagaaataaaattaatttttgtatattgattttgtatattgtagcttttctaaaattctttttttgtcacttagtattttttgcatatgagatcatgcatctgtgaacagaaatacttttacttcttcctttccagtctagattcctattatttcattttcttgccttagtgtgctggctagcacctccagtacaatattggatagaagtgacaagagcagacatctttttcttgttcctgattttaaggggaaagcattcagtctttcaccattgagtatgatgttagctagctgtgggtttgcttcaagttgaggaaattcttttattaaacctagtttactgagtgttttttaatcaaaaaaaaaaaaaggaggggctgtgggttttgttaaatgcttcttctgtatcaagattttcatgttgttttgtcctttattaatatgttgtattaatggacttttgtatattgaattaactttgcattcctgggataatctcagttgtccatgctacataaaccttgttctatgctgctgga

SEQ ID NO: 660 - DNA, 8072 bp, Homo sapiens
  source 1..8072: mol_type = genomic DNA
ggtaaataccttaaattggaattactgggtcacatggttaaaaatctgtaagagcctgattttagaattcaccagctcctcagaagtttggcgaaatatgagttattaagcctacgctcagatcaaggtagcagctagactggtgtgacaacctgtttttaatcagtgactcaaagctgtgatcaccctgatgtcaccgaatggccacagcttgtaaaagatcaggagaacctcagtctgacgacattgaagctagccgaatgaagcgagcagctgcaaagcatctaatagaacgctactaccaccagttaactgagggctgtggaaatgaagcctgcacgaatgagttttgtgcttcctgtccaacttttcttcgtatggataataatgcagcagctattaaagccctcgagctttataagattaatgcaaaactctgtgatcctcatccctccaagaaaggagcaagctcagcttaccttgagaactcgaaaggtgcccccaacaactcctgctctgagataaaaatgaacaagaaaggcgctagaattgattttaaagatgtgacttacttaacagaagagaaggtatatgaaattcttgaattatgtagagaaagagaggattattcccctttaatccgtgttattggaagagttttttctagtgctgaggcattggtacagagcttccggaaagttaaacaacacaccaaggaagaactgaaatctcttcaagcaaaagatgaagacaaagatgaagatgaaaaggaaaaagctgcatgttctgctgctgctatggaagaagactcagaagcatcttcctcaaggataggtgatagctcacagggagacaacaatttgcaaaaattaggccctgatgatgtgtctgtggatattgatgccattagaagggtctacaccagattgctctctaatgaaaaaattgaaactgcctttctcaatgcacttgtatatttgtcacctaacgtggaatgtgacttgacgtatcacaatgtatactctcgagatcctaattatctgaatttgttcattatcgtaatggagaatagaaatctccacagtcctgaatatctggaaatggctttgccattattttgcaaagcgatgagcaagctaccccttgcagcccaaggaaaactgatcagactgtggtctaaatacaatgcagaccagattcggagaatgatggagacatttcagcaacttattacttataaagtcataagcaatgaatttaacagtcgaaatctagtgaatgatgatgatgccattgttgctgcttcgaagtgcttgaaaatggtttactatgcaaatgtagtgggaggggaagtggacacaaatcacaatgaagaagatgatgaagagcccatccctgagtccagcgagctgacacttcaggaacttttgggagaagaaagaagaaacaagaaaggtcctcgagtggaccccctggaaactgaacttggtgttaaaaccctggattgtcgaaaaccacttatcccttttgaagagtttattaatgaaccactgaatgaggttctagaaatggataaagattatacttttttcaaagtagaaacagagaacaaattctcttttatgacatgtccctttatattgaatgctgtcacaaagaatttgggattatattatgacaatagaattcgcatgtacagtgaacgaagaatcactgttctctacagcttagttcaaggacagcagttgaatccatatttgagactcaaagttagacgtgaccatatcatagatgatgcacttgtccggctagagatgatcgctatggaaaatcctgcagacttgaagaagcagttgtatgtggaatttgaaggagaacaaggagttgatgagggaggtgtttccaaagaattttttcagctggttgtggaggaaatcttcaatccagatattggtatgttcacatacgatgaatctacaaaattgttttggtttaatccatcttcttttgaaactgagggtcagtttactctgattggcatagtactgggtctggctatttacaataactgtatactggatgtacattttcccatggttgtctacaggaagctaatggggaaaaaaggaacttttcgtgacttgggagactctcacccagttctatatcagagtttaaaagatttattggagtatgaagggaatgtggaagatgacatgatgatcactttccagatatcacagacagatctttttggtaacccaatgatgtatgatctaaaggaaaatggtgataaaattccaattacaaatgaaaacaggaagaatctagatttccaagcactagaagaaactacagaatatgacggtggctataccagggactctgttctgattagggagttctgggaaatcgttcattcatttacagatgaacagaaaagactcttcttgcagtttacaacgggcacagacagagcacctgtgggaggactaggaaaattaaagatgattatagccaaaaatggcccagacacagaaaggttacctacatctcatacttgctttaatgtgcttttacttccggaatactcaagcaaagaaaaacttaaagagagattgttgaaggccatcacgtatgccaaaggatttggcatgctgtaaaacaaaacaaaacaaaataaaacaaaaaaaaggaaggaaaaaaaaagaaaaaatttaaaaaattttaaaaatataacgagggataaatttttggtggtgatagtgtcccagtacaaaaaggctgtaagatagtcaaccacagtagtcacctatgtctgtgcctcccttctttattggggacatgtgggctggaacagcagatttcagctacatatatgaacaaatcctttattattattataattatttttttgcgtgaaagtgttacatattctttcacttgtatgtacagagaggtttttctgaatatttattttaagggttaaatcacttttgcttgtgtttattactgcttgaggttgagccttttgagtatttaaaaaatatataccaacagaactactctcccaaggaaaatattgccaccatttgtagaccacgtaaccttcaagtatgtgctacttttttgtccctgtatctaactcaaatcaggaactgtattttttttaatgatttgcttttgaaacttgaagtcttgaaaacagtgtgatgcaattactgctgttctagcccccaaagagttttctgtgcaaaatcttgagaatcaatcaataaagaaagatggaaggaagggagaaattggaatgttttaactgcagccctcagaactttagtaacagcacaacaaattaaaaacaaaaacaactcatgccacagtatgtcgtcttcatgtgtcttgcaatgaactgtttcagtagccaatcctctttcttagtatatgaaaggacagggatttttgttcttgttgttctcgttgttgttttaagtttactggggaaagtgcatttggccaaatgaaatggtagtcaagcctattgcaacaaagttaggaagtttgttgtttgtttattataaacaaaaagcatgtgaaagtgcacttaagatagagtttttattaattacttacttattacctagattttaaatagacaatccaaagtctccccttcgtgttgccatcatcttgttgaatcagccattttatcgaggcacgtgatcagtgttgcaacataatgaaaaagatggctactgtgccttgtgttacttaatcatacagtaagctgacctggaaatgaatgaaactattactcctaagaattacattgtatagccccacagattaaatttaattaattaattcaaaacatgttaaacgttactttcatgtactatggaaaagtacaagtaggtttacattactgatttccagaagtaagtagtttcccctttcctagtcttctgtgtatgtgatgttgttaatttcttttattgcattataaaataaaaggattatgtatttttaactaaggtgagacattgatatatccttttgctacaagctatagctaatgtgctgagcttgtgccttggtgattgattgattgattgactgattgttttaactgattactgtagatcaacctgatgatttgtttgtttgaaattggcaggaaaaatgcagctttcaaatcattggggggagaaaaaggatgtctttcaggattattttaattaatttttttcataattgagacagaactgtttgttatgtaccataatgctaaataaaactgtggcacttttcaccataatttaatttagtggaaaaagaagacaatgctttccatattgtgataaggtaacatggggtttttctgggccagcctttagaacactgttagggtacatacgctaccttgatgaaagggaccttcgtgcaactgtagtcatcttaaaggcttctcatccactgtgcttcttaatgtgtaattaaagtgaggagaaattaaatactctgagggcgttttatataataaattcgtgaagaaatgtgtgctcttcagttctcaagttttattattatggtatttattaaagttctacaattgtaataacgtatccatatgacaagttttaaagtggtaattgaaataggttatcagatatagagttgttcacatcaagtagacttttaacagagtcagaatgaacctacccttaaaattttagagaaaaaaaatcgtcggttgcacagaatagctgctctagcttgcttaattatgccgggcatgttgtcactcctcttacttttgctgccttttcattactatttaatggaatgtccctgaacaataaggaagagcaaaacatagacattttgactacagtggatacttcctctaccccaaatgttatgttataaaagtactttttttgcccaggtactctattatatattttggttttctttgaattagacctcaatctccaggaagctctggagggaaaaaaaggaaccataaactaaagtaactggttttccaaataaatgtaaacttttttaaccttttattattatagaacatttcaaacatacataaaacatgaaaacagcctgcagccaaacttttctggaccttggcagctccagcaaatgagctggtcatcctaaccctggtttcctgagacaactacttttggggatgcttgcttgtatagggagatgatagatagatagatacatatcaaaaagaaacttgaaaaaggcttcgaacagaacttgccgatgttactcatccctcctcggtacagacattctgttagaacagatggttgtaatggggcagcatcactccctattcccattaaaaacatgaccattctgagatttcaggccccttcgaggaatttttctcaagaattccatacaaactgtcagaggaagaaatgtcgtcccaagactagtccctgtgtagtcttgatccctttacctgcttactgtaattttttttctctgactttccgccagtgtctaagggccatctgtacccctcccacccttccatgagccactgtataatccaaaaacacaccttccatttgctccctcacttgtctccttttacctcaacagtgttagtgtgtaaagaattgcctggggagggtagagggttttacaagtacagagtcccaagtcttttctcccctccccgttagtgggttggcatttattaataggcactgcaagattttgatgcaggtgtggggtagatatcactgtgaaaggctactaatgcatggtagtttcaccgaaagtacagtcttcaaggatccttataatctcctcattgccaaaatcagtaacatctataaccttgacaacaccctagcttgggctgttgcttctctggctacttgtttttccatcccagtttacccagattttagatggatactcctccaattctgcttaaagtccttacctgttcttgcccagttccctctagtcaacctcagtcactcccaaagattcttccccaatcccatatcttttgctcagacctctgtctctgggatttctttgttacctcatagtcagtagtcctaaaaacaaaattcttcatcttgcatctctatcgaccgaccattctttgtttctttttaagaaatgtaaccttcaccccaatcatcaaaatctctcattcctcaattgtcacaggttgtcacttctttccccctaaacctctcccatcattccttccttctttatactgcccttacaggtcctgatcctctgactcacccggacattcttagcagctgcctaatttcactccctgactctcatctccctcttccaatccttttcattgtgctagaacactatcttgctaattttaatatcctctgcattcagtgcctccacagattgccccctcactgacctttccaatttggccttgtgttacacactttcctcgctgcattcctacccagcatcttcacttgtcatatttctcaaatactcttcatgaccagatatttaaagtacctcatccatgaagacttcatcaacccccaaagtgcctccaatgcttccgtggtagcacagcataatggggtacatttcttagttgaacagtgaggagtcactgggattcttacagagtgtcttagggtctcctcttgatactctttccacatttcagttaaggaattttcttacatctttttttcttctaataacctttgcctggagtgtaagtaaattcatgatagagactgtcatttttaaaaaaaaaaacaaaccattttgcctttcacatgttattacctccatctttctgttatcttgtcagtgttgccacctaaatgattgaaaatgaccgagcatgcagtagaatgtagtgaagtttcctatttcatccattttttgcataagtgcattggtatctgtatatccatctgcccaagcaccagttgttgaaaagactattatttccccatgaatggtcctggtacccttgtcaaagaacagttgaccataaatataagactttctggattctcagtcttactccattgccctatatgtctgtcgttataccagcaccgcactgtcttgatggctgtagcttggtagtaagtttagatttgggatgtgcaagtcctccattttttttttttttttccccaaaatcattttgtctgttttgggtcccttgcattgcatatgaatttttatatgatcattgtgtcaattcctgcaaaacagctgggatcttgatagggatttagttgaattggtagataaatttgagaaataactgctattttaatggtgttaggttttctgttccatgactgtgggatgtctttgcatttgcttaggtctttatttcagtgatgttttagagatttcagtgtgcaagtcttgacgtctttaatttttttctaagtattttactgatgccactttaattatatgattattttctaatttttatttttgtattcatcactggtgttagaaataaaattaatttttgtatattgattttgtatattgtagcttttctaaaattctttttttgtcacttagtattttttgcatatgagatcatgcatctgtgaacagaaatacttttacttcttcctttccagtctagattcctattatttcattttcttgccttagtgtgctggctagcacctccagtacaatattggatagaagtgacaagagcagacatctttttcttgttcctgattttaaggggaaagcattcagtctttcaccattgagtatgatgttagctagctgtgggtttgcttcaagttgaggaaattcttttattaaacctagtttactgagtgttttttaatcaaaaaaaaaaaaaggaggggctgtgggttttgttaaatgcttcttctgtatcaagattttcatgttgttttgtcctttattaatatgttgtattaatggacttttgtatattgaattaactttgcattcctgggataatctcagttgtccatgctacataaaccttgttctatgctgctgga

SEQ ID NO: 661 - DNA, 8293 bp, Homo sapiens
  source 1..8293: mol_type = genomic DNA
ggtaaataccttaaattggaattactgggtcacatggttaaaaatctgtaagagcctgattttagaattcaccagctcctcagaagtttggcgaaatatgagttattaagcctacgctcagatcaaggtagcagctagactggtgtgacaacctgtttttaatcagtgactcaaagctgtgatcaccctgatgtcaccgaatggccacagcttgtaaaagagagttacagtggaggtaaaaggagtggcttgcaggatggagaagctgcaccagtgttattggaaatcaggagaacctcagtctgacgacattgaagctagccgaatgaagcgagcagctgcaaagcatctaatagaacgctactaccaccagttaactgagggctgtggaaatgaagcctgcacgaatgagttttgtgcttcctgtccaacttttcttcgtatggataataatgcagcagctattaaagccctcgagctttataagattaatgcaaaactctgtgatcctcatccctccaagaaaggagcaagctcagcttaccttgagaactcgaaaggtgcccccaacaactcctgctctgagataaaaatgaacaagaaaggcgctagaattgattttaaagatgtgacttacttaacagaagagaaggtatatgaaattcttgaattatgtagagaaagagaggattattcccctttaatccgtgttattggaagagttttttctagtgctgaggcattggtacagagcttccggaaagttaaacaacacaccaaggaagaactgaaatctcttcaagcaaaagatgaagacaaagatgaagatgaaaaggaaaaagctgcatgttctgctgctgctatggaagaagactcagaagcatcttcctcaaggataggtgatagctcacagggagacaacaatttgcaaaaattaggccctgatgatgtgtctgtggatattgatgccattagaagggtctacaccagattgctctctaatgaaaaaattgaaactgcctttctcaatgcacttgtatatttgtcacctaacgtggaatgtgacttgacgtatcacaatgtatactctcgagatcctaattatctgaatttgttcattatcgtaatggagaatagaaatctccacagtcctgaatatctggaaatggctttgccattattttgcaaagcgatgagcaagctaccccttgcagcccaaggaaaactgatcagactgtggtctaaatacaatgcagaccagattcggagaatgatggagacatttcagcaacttattacttataaagtcataagcaatgaatttaacagtcgaaatctagtgaatgatgatgatgccattgttgctgcttcgaagtgcttgaaaatggtttactatgcaaatgtagtgggaggggaagtggacacaaatcacaatgaagaagatgatgaagagcccatccctgagtccagcgagctgacacttcaggaacttttgggagaagaaagaagaaacaagaaaggtcctcgagtggaccccctggaaactgaacttggtgttaaaaccctggattgtcgaaaaccacttatcccttttgaagagtttattaatgaaccactgaatgaggttctagaaatggataaagattatacttttttcaaagtagaaacagagaacaaattctcttttatgacatgtccctttatattgaatgctgtcacaaagaatttgggattatattatgacaatagaattcgcatgtacagtgaacgaagaatcactgttctctacagcttagttcaaggacagcagttgaatccatatttgagactcaaagttagacgtgaccatatcatagatgatgcacttgtccggctagagatgatcgctatggaaaatcctgcagacttgaagaagcagttgtatgtggaatttgaaggagaacaaggagttgatgagggaggtgtttccaaagaattttttcagctggttgtggaggaaatcttcaatccagatattggtatgttcacatacgatgaatctacaaaattgttttggtttaatccatcttcttttgaaactgagggtcagtttactctgattggcatagtactgggtctggctatttacaataactgtatactggatgtacattttcccatggttgtctacaggaagctaatggggaaaaaaggaacttttcgtgacttgggagactctcacccagttctatatcagagtttaaaagatttattggagtatgaagggaatgtggaagatgacatgatgatcactttccagatatcacagacagatctttttggtaacccaatgatgtatgatctaaaggaaaatggtgataaaattccaattacaaatgaaaacaggaaggaatttgtcaatctttattctgactacattctcaataaatcagtagaaaaacagttcaaggcttttcggagaggttttcatatggtgaccaatgaatctcccttaaagtacttattcagaccagaagaaattgaattgcttatatgtggaagccggaatctagatttccaagcactagaagaaactacagaatatgacggtggctataccagggactctgttctgattagggagttctgggaaatcgttcattcatttacagatgaacagaaaagactcttcttgcagtttacaacgggcacagacagagcacctgtgggaggactaggaaaattaaagatgattatagccaaaaatggcccagacacagaaaggttacctacatctcatacttgctttaatgtgcttttacttccggaatactcaagcaaagaaaaacttaaagagagattgttgaaggccatcacgtatgccaaaggatttggcatgctgtaaaacaaaacaaaacaaaataaaacaaaaaaaaggaaggaaaaaaaaagaaaaaatttaaaaaattttaaaaatataacgagggataaatttttggtggtgatagtgtcccagtacaaaaaggctgtaagatagtcaaccacagtagtcacctatgtctgtgcctcccttctttattggggacatgtgggctggaacagcagatttcagctacatatatgaacaaatcctttattattattataattatttttttgcgtgaaagtgttacatattctttcacttgtatgtacagagaggtttttctgaatatttattttaagggttaaatcacttttgcttgtgtttattactgcttgaggttgagccttttgagtatttaaaaaatatataccaacagaactactctcccaaggaaaatattgccaccatttgtagaccacgtaaccttcaagtatgtgctacttttttgtccctgtatctaactcaaatcaggaactgtattttttttaatgatttgcttttgaaacttgaagtcttgaaaacagtgtgatgcaattactgctgttctagcccccaaagagttttctgtgcaaaatcttgagaatcaatcaataaagaaagatggaaggaagggagaaattggaatgttttaactgcagccctcagaactttagtaacagcacaacaaattaaaaacaaaaacaactcatgccacagtatgtcgtcttcatgtgtcttgcaatgaactgtttcagtagccaatcctctttcttagtatatgaaaggacagggatttttgttcttgttgttctcgttgttgttttaagtttactggggaaagtgcatttggccaaatgaaatggtagtcaagcctattgcaacaaagttaggaagtttgttgtttgtttattataaacaaaaagcatgtgaaagtgcacttaagatagagtttttattaattacttacttattacctagattttaaatagacaatccaaagtctccccttcgtgttgccatcatcttgttgaatcagccattttatcgaggcacgtgatcagtgttgcaacataatgaaaaagatggctactgtgccttgtgttacttaatcatacagtaagctgacctggaaatgaatgaaactattactcctaagaattacattgtatagccccacagattaaatttaattaattaattcaaaacatgttaaacgttactttcatgtactatggaaaagtacaagtaggtttacattactgatttccagaagtaagtagtttcccctttcctagtcttctgtgtatgtgatgttgttaatttcttttattgcattataaaataaaaggattatgtatttttaactaaggtgagacattgatatatccttttgctacaagctatagctaatgtgctgagcttgtgccttggtgattgattgattgattgactgattgttttaactgattactgtagatcaacctgatgatttgtttgtttgaaattggcaggaaaaatgcagctttcaaatcattggggggagaaaaaggatgtctttcaggattattttaattaatttttttcataattgagacagaactgtttgttatgtaccataatgctaaataaaactgtggcacttttcaccataatttaatttagtggaaaaagaagacaatgctttccatattgtgataaggtaacatggggtttttctgggccagcctttagaacactgttagggtacatacgctaccttgatgaaagggaccttcgtgcaactgtagtcatcttaaaggcttctcatccactgtgcttcttaatgtgtaattaaagtgaggagaaattaaatactctgagggcgttttatataataaattcgtgaagaaatgtgtgctcttcagttctcaagttttattattatggtatttattaaagttctacaattgtaataacgtatccatatgacaagttttaaagtggtaattgaaataggttatcagatatagagttgttcacatcaagtagacttttaacagagtcagaatgaacctacccttaaaattttagagaaaaaaaatcgtcggttgcacagaatagctgctctagcttgcttaattatgccgggcatgttgtcactcctcttacttttgctgccttttcattactatttaatggaatgtccctgaacaataaggaagagcaaaacatagacattttgactacagtggatacttcctctaccccaaatgttatgttataaaagtactttttttgcccaggtactctattatatattttggttttctttgaattagacctcaatctccaggaagctctggagggaaaaaaaggaaccataaactaaagtaactggttttccaaataaatgtaaacttttttaaccttttattattatagaacatttcaaacatacataaaacatgaaaacagcctgcagccaaacttttctggaccttggcagctccagcaaatgagctggtcatcctaaccctggtttcctgagacaactacttttggggatgcttgcttgtatagggagatgatagatagatagatacatatcaaaaagaaacttgaaaaaggcttcgaacagaacttgccgatgttactcatccctcctcggtacagacattctgttagaacagatggttgtaatggggcagcatcactccctattcccattaaaaacatgaccattctgagatttcaggccccttcgaggaatttttctcaagaattccatacaaactgtcagaggaagaaatgtcgtcccaagactagtccctgtgtagtcttgatccctttacctgcttactgtaattttttttctctgactttccgccagtgtctaagggccatctgtacccctcccacccttccatgagccactgtataatccaaaaacacaccttccatttgctccctcacttgtctccttttacctcaacagtgttagtgtgtaaagaattgcctggggagggtagagggttttacaagtacagagtcccaagtcttttctcccctccccgttagtgggttggcatttattaataggcactgcaagattttgatgcaggtgtggggtagatatcactgtgaaaggctactaatgcatggtagtttcaccgaaagtacagtcttcaaggatccttataatctcctcattgccaaaatcagtaacatctataaccttgacaacaccctagcttgggctgttgcttctctggctacttgtttttccatcccagtttacccagattttagatggatactcctccaattctgcttaaagtccttacctgttcttgcccagttccctctagtcaacctcagtcactcccaaagattcttccccaatcccatatcttttgctcagacctctgtctctgggatttctttgttacctcatagtcagtagtcctaaaaacaaaattcttcatcttgcatctctatcgaccgaccattctttgtttctttttaagaaatgtaaccttcaccccaatcatcaaaatctctcattcctcaattgtcacaggttgtcacttctttccccctaaacctctcccatcattccttccttctttatactgcccttacaggtcctgatcctctgactcacccggacattcttagcagctgcctaatttcactccctgactctcatctccctcttccaatccttttcattgtgctagaacactatcttgctaattttaatatcctctgcattcagtgcctccacagattgccccctcactgacctttccaatttggccttgtgttacacactttcctcgctgcattcctacccagcatcttcacttgtcatatttctcaaatactcttcatgaccagatatttaaagtacctcatccatgaagacttcatcaacccccaaagtgcctccaatgcttccgtggtagcacagcataatggggtacatttcttagttgaacagtgaggagtcactgggattcttacagagtgtcttagggtctcctcttgatactctttccacatttcagttaaggaattttcttacatctttttttcttctaataacctttgcctggagtgtaagtaaattcatgatagagactgtcatttttaaaaaaaaaaacaaaccattttgcctttcacatgttattacctccatctttctgttatcttgtcagtgttgccacctaaatgattgaaaatgaccgagcatgcagtagaatgtagtgaagtttcctatttcatccattttttgcataagtgcattggtatctgtatatccatctgcccaagcaccagttgttgaaaagactattatttccccatgaatggtcctggtacccttgtcaaagaacagttgaccataaatataagactttctggattctcagtcttactccattgccctatatgtctgtcgttataccagcaccgcactgtcttgatggctgtagcttggtagtaagtttagatttgggatgtgcaagtcctccattttttttttttttttccccaaaatcattttgtctgttttgggtcccttgcattgcatatgaatttttatatgatcattgtgtcaattcctgcaaaacagctgggatcttgatagggatttagttgaattggtagataaatttgagaaataactgctattttaatggtgttaggttttctgttccatgactgtgggatgtctttgcatttgcttaggtctttatttcagtgatgttttagagatttcagtgtgcaagtcttgacgtctttaatttttttctaagtattttactgatgccactttaattatatgattattttctaatttttatttttgtattcatcactggtgttagaaataaaattaatttttgtatattgattttgtatattgtagcttttctaaaattctttttttgtcacttagtattttttgcatatgagatcatgcatctgtgaacagaaatacttttacttcttcctttccagtctagattcctattatttcattttcttgccttagtgtgctggctagcacctccagtacaatattggatagaagtgacaagagcagacatctttttcttgttcctgattttaaggggaaagcattcagtctttcaccattgagtatgatgttagctagctgtgggtttgcttcaagttgaggaaattcttttattaaacctagtttactgagtgttttttaatcaaaaaaaaaaaaaggaggggctgtgggttttgttaaatgcttcttctgtatcaagattttcatgttgttttgtcctttattaatatgttgtattaatggacttttgtatattgaattaactttgcattcctgggataatctcagttgtccatgctacataaaccttgttctatgctgctgga

SEQ ID NO: 662 - DNA, 8356 bp, Homo sapiens
  source 1..8356: mol_type = genomic DNA
ggtaaataccttaaattggaattactgggtcacatgaggggaggtatggtgtcaagaaaacatagtcaccattattacgaaaagtaaaatatggaagagatgatccctaccatcaatcagcttacaactagaggcactgacaaatgtatacagatagctgtaatgttaaaaatctgtaagagcctgattttagaattcaccagctcctcagaagtttggcgaaatatgagttattaagcctacgctcagatcaaggtagcagctagactggtgtgacaacctgtttttaatcagtgactcaaagctgtgatcaccctgatgtcaccgaatggccacagcttgtaaaagatcaggagaacctcagtctgacgacattgaagctagccgaatgaagcgagcagctgcaaagcatctaatagaacgctactaccaccagttaactgagggctgtggaaatgaagcctgcacgaatgagttttgtgcttcctgtccaacttttcttcgtatggataataatgcagcagctattaaagccctcgagctttataagattaatgcaaaactctgtgatcctcatccctccaagaaaggagcaagctcagcttaccttgagaactcgaaaggtgcccccaacaactcctgctctgagataaaaatgaacaagaaaggcgctagaattgattttaaagatgtgacttacttaacagaagagaaggtatatgaaattcttgaattatgtagagaaagagaggattattcccctttaatccgtgttattggaagagttttttctagtgctgaggcattggtacagagcttccggaaagttaaacaacacaccaaggaagaactgaaatctcttcaagcaaaagatgaagacaaagatgaagatgaaaaggaaaaagctgcatgttctgctgctgctatggaagaagactcagaagcatcttcctcaaggataggtgatagctcacagggagacaacaatttgcaaaaattaggccctgatgatgtgtctgtggatattgatgccattagaagggtctacaccagattgctctctaatgaaaaaattgaaactgcctttctcaatgcacttgtatatttgtcacctaacgtggaatgtgacttgacgtatcacaatgtatactctcgagatcctaattatctgaatttgttcattatcgtaatggagaatagaaatctccacagtcctgaatatctggaaatggctttgccattattttgcaaagcgatgagcaagctaccccttgcagcccaaggaaaactgatcagactgtggtctaaatacaatgcagaccagattcggagaatgatggagacatttcagcaacttattacttataaagtcataagcaatgaatttaacagtcgaaatctagtgaatgatgatgatgccattgttgctgcttcgaagtgcttgaaaatggtttactatgcaaatgtagtgggaggggaagtggacacaaatcacaatgaagaagatgatgaagagcccatccctgagtccagcgagctgacacttcaggaacttttgggagaagaaagaagaaacaagaaaggtcctcgagtggaccccctggaaactgaacttggtgttaaaaccctggattgtcgaaaaccacttatcccttttgaagagtttattaatgaaccactgaatgaggttctagaaatggataaagattatacttttttcaaagtagaaacagagaacaaattctcttttatgacatgtccctttatattgaatgctgtcacaaagaatttgggattatattatgacaatagaattcgcatgtacagtgaacgaagaatcactgttctctacagcttagttcaaggacagcagttgaatccatatttgagactcaaagttagacgtgaccatatcatagatgatgcacttgtccggctagagatgatcgctatggaaaatcctgcagacttgaagaagcagttgtatgtggaatttgaaggagaacaaggagttgatgagggaggtgtttccaaagaattttttcagctggttgtggaggaaatcttcaatccagatattggtatgttcacatacgatgaatctacaaaattgttttggtttaatccatcttcttttgaaactgagggtcagtttactctgattggcatagtactgggtctggctatttacaataactgtatactggatgtacattttcccatggttgtctacaggaagctaatggggaaaaaaggaacttttcgtgacttgggagactctcacccagttctatatcagagtttaaaagatttattggagtatgaagggaatgtggaagatgacatgatgatcactttccagatatcacagacagatctttttggtaacccaatgatgtatgatctaaaggaaaatggtgataaaattccaattacaaatgaaaacaggaaggaatttgtcaatctttattctgactacattctcaataaatcagtagaaaaacagttcaaggcttttcggagaggttttcatatggtgaccaatgaatctcccttaaagtacttattcagaccagaagaaattgaattgcttatatgtggaagccggaatctagatttccaagcactagaagaaactacagaatatgacggtggctataccagggactctgttctgattagggagttctgggaaatcgttcattcatttacagatgaacagaaaagactcttcttgcagtttacaacgggcacagacagagcacctgtgggaggactaggaaaattaaagatgattatagccaaaaatggcccagacacagaaaggttacctacatctcatacttgctttaatgtgcttttacttccggaatactcaagcaaagaaaaacttaaagagagattgttgaaggccatcacgtatgccaaaggatttggcatgctgtaaaacaaaacaaaacaaaataaaacaaaaaaaaggaaggaaaaaaaaagaaaaaatttaaaaaattttaaaaatataacgagggataaatttttggtggtgatagtgtcccagtacaaaaaggctgtaagatagtcaaccacagtagtcacctatgtctgtgcctcccttctttattggggacatgtgggctggaacagcagatttcagctacatatatgaacaaatcctttattattattataattatttttttgcgtgaaagtgttacatattctttcacttgtatgtacagagaggtttttctgaatatttattttaagggttaaatcacttttgcttgtgtttattactgcttgaggttgagccttttgagtatttaaaaaatatataccaacagaactactctcccaaggaaaatattgccaccatttgtagaccacgtaaccttcaagtatgtgctacttttttgtccctgtatctaactcaaatcaggaactgtattttttttaatgatttgcttttgaaacttgaagtcttgaaaacagtgtgatgcaattactgctgttctagcccccaaagagttttctgtgcaaaatcttgagaatcaatcaataaagaaagatggaaggaagggagaaattggaatgttttaactgcagccctcagaactttagtaacagcacaacaaattaaaaacaaaaacaactcatgccacagtatgtcgtcttcatgtgtcttgcaatgaactgtttcagtagccaatcctctttcttagtatatgaaaggacagggatttttgttcttgttgttctcgttgttgttttaagtttactggggaaagtgcatttggccaaatgaaatggtagtcaagcctattgcaacaaagttaggaagtttgttgtttgtttattataaacaaaaagcatgtgaaagtgcacttaagatagagtttttattaattacttacttattacctagattttaaatagacaatccaaagtctccccttcgtgttgccatcatcttgttgaatcagccattttatcgaggcacgtgatcagtgttgcaacataatgaaaaagatggctactgtgccttgtgttacttaatcatacagtaagctgacctggaaatgaatgaaactattactcctaagaattacattgtatagccccacagattaaatttaattaattaattcaaaacatgttaaacgttactttcatgtactatggaaaagtacaagtaggtttacattactgatttccagaagtaagtagtttcccctttcctagtcttctgtgtatgtgatgttgttaatttcttttattgcattataaaataaaaggattatgtatttttaactaaggtgagacattgatatatccttttgctacaagctatagctaatgtgctgagcttgtgccttggtgattgattgattgattgactgattgttttaactgattactgtagatcaacctgatgatttgtttgtttgaaattggcaggaaaaatgcagctttcaaatcattggggggagaaaaaggatgtctttcaggattattttaattaatttttttcataattgagacagaactgtttgttatgtaccataatgctaaataaaactgtggcacttttcaccataatttaatttagtggaaaaagaagacaatgctttccatattgtgataaggtaacatggggtttttctgggccagcctttagaacactgttagggtacatacgctaccttgatgaaagggaccttcgtgcaactgtagtcatcttaaaggcttctcatccactgtgcttcttaatgtgtaattaaagtgaggagaaattaaatactctgagggcgttttatataataaattcgtgaagaaatgtgtgctcttcagttctcaagttttattattatggtatttattaaagttctacaattgtaataacgtatccatatgacaagttttaaagtggtaattgaaataggttatcagatatagagttgttcacatcaagtagacttttaacagagtcagaatgaacctacccttaaaattttagagaaaaaaaatcgtcggttgcacagaatagctgctctagcttgcttaattatgccgggcatgttgtcactcctcttacttttgctgccttttcattactatttaatggaatgtccctgaacaataaggaagagcaaaacatagacattttgactacagtggatacttcctctaccccaaatgttatgttataaaagtactttttttgcccaggtactctattatatattttggttttctttgaattagacctcaatctccaggaagctctggagggaaaaaaaggaaccataaactaaagtaactggttttccaaataaatgtaaacttttttaaccttttattattatagaacatttcaaacatacataaaacatgaaaacagcctgcagccaaacttttctggaccttggcagctccagcaaatgagctggtcatcctaaccctggtttcctgagacaactacttttggggatgcttgcttgtatagggagatgatagatagatagatacatatcaaaaagaaacttgaaaaaggcttcgaacagaacttgccgatgttactcatccctcctcggtacagacattctgttagaacagatggttgtaatggggcagcatcactccctattcccattaaaaacatgaccattctgagatttcaggccccttcgaggaatttttctcaagaattccatacaaactgtcagaggaagaaatgtcgtcccaagactagtccctgtgtagtcttgatccctttacctgcttactgtaattttttttctctgactttccgccagtgtctaagggccatctgtacccctcccacccttccatgagccactgtataatccaaaaacacaccttccatttgctccctcacttgtctccttttacctcaacagtgttagtgtgtaaagaattgcctggggagggtagagggttttacaagtacagagtcccaagtcttttctcccctccccgttagtgggttggcatttattaataggcactgcaagattttgatgcaggtgtggggtagatatcactgtgaaaggctactaatgcatggtagtttcaccgaaagtacagtcttcaaggatccttataatctcctcattgccaaaatcagtaacatctataaccttgacaacaccctagcttgggctgttgcttctctggctacttgtttttccatcccagtttacccagattttagatggatactcctccaattctgcttaaagtccttacctgttcttgcccagttccctctagtcaacctcagtcactcccaaagattcttccccaatcccatatcttttgctcagacctctgtctctgggatttctttgttacctcatagtcagtagtcctaaaaacaaaattcttcatcttgcatctctatcgaccgaccattctttgtttctttttaagaaatgtaaccttcaccccaatcatcaaaatctctcattcctcaattgtcacaggttgtcacttctttccccctaaacctctcccatcattccttccttctttatactgcccttacaggtcctgatcctctgactcacccggacattcttagcagctgcctaatttcactccctgactctcatctccctcttccaatccttttcattgtgctagaacactatcttgctaattttaatatcctctgcattcagtgcctccacagattgccccctcactgacctttccaatttggccttgtgttacacactttcctcgctgcattcctacccagcatcttcacttgtcatatttctcaaatactcttcatgaccagatatttaaagtacctcatccatgaagacttcatcaacccccaaagtgcctccaatgcttccgtggtagcacagcataatggggtacatttcttagttgaacagtgaggagtcactgggattcttacagagtgtcttagggtctcctcttgatactctttccacatttcagttaaggaattttcttacatctttttttcttctaataacctttgcctggagtgtaagtaaattcatgatagagactgtcatttttaaaaaaaaaaacaaaccattttgcctttcacatgttattacctccatctttctgttatcttgtcagtgttgccacctaaatgattgaaaatgaccgagcatgcagtagaatgtagtgaagtttcctatttcatccattttttgcataagtgcattggtatctgtatatccatctgcccaagcaccagttgttgaaaagactattatttccccatgaatggtcctggtacccttgtcaaagaacagttgaccataaatataagactttctggattctcagtcttactccattgccctatatgtctgtcgttataccagcaccgcactgtcttgatggctgtagcttggtagtaagtttagatttgggatgtgcaagtcctccattttttttttttttttccccaaaatcattttgtctgttttgggtcccttgcattgcatatgaatttttatatgatcattgtgtcaattcctgcaaaacagctgggatcttgatagggatttagttgaattggtagataaatttgagaaataactgctattttaatggtgttaggttttctgttccatgactgtgggatgtctttgcatttgcttaggtctttatttcagtgatgttttagagatttcagtgtgcaagtcttgacgtctttaatttttttctaagtattttactgatgccactttaattatatgattattttctaatttttatttttgtattcatcactggtgttagaaataaaattaatttttgtatattgattttgtatattgtagcttttctaaaattctttttttgtcacttagtattttttgcatatgagatcatgcatctgtgaacagaaatacttttacttcttcctttccagtctagattcctattatttcattttcttgccttagtgtgctggctagcacctccagtacaatattggatagaagtgacaagagcagacatctttttcttgttcctgattttaaggggaaagcattcagtctttcaccattgagtatgatgttagctagctgtgggtttgcttcaagttgaggaaattcttttattaaacctagtttactgagtgttttttaatcaaaaaaaaaaaaaggaggggctgtgggttttgttaaatgcttcttctgtatcaagattttcatgttgttttgtcctttattaatatgttgtattaatggacttttgtatattgaattaactttgcattcctgggataatctcagttgtccatgctacataaaccttgttctatgctgctgga

SEQ ID NO: 663 - DNA, 8361 bp, Homo sapiens
  source 1..8361: mol_type = genomic DNA
ggtaaataccttaaattggaattactgggtcacatgaggggaggtatggtgtcaagaaaacatagtcaccattattacgaaaagtaaaatatggaagagatgatccctaccatcaatcagcttacaactagaggcactgacaaatgtatacagatagctgtaatgtaaggttaaaaatctgtaagagcctgattttagaattcaccagctcctcagaagtttggcgaaatatgagttattaagcctacgctcagatcaaggtagcagctagactggtgtgacaacctgtttttaatcagtgactcaaagctgtgatcaccctgatgtcaccgaatggccacagcttgtaaaagatcaggagaacctcagtctgacgacattgaagctagccgaatgaagcgagcagctgcaaagcatctaatagaacgctactaccaccagttaactgagggctgtggaaatgaagcctgcacgaatgagttttgtgcttcctgtccaacttttcttcgtatggataataatgcagcagctattaaagccctcgagctttataagattaatgcaaaactctgtgatcctcatccctccaagaaaggagcaagctcagcttaccttgagaactcgaaaggtgcccccaacaactcctgctctgagataaaaatgaacaagaaaggcgctagaattgattttaaagatgtgacttacttaacagaagagaaggtatatgaaattcttgaattatgtagagaaagagaggattattcccctttaatccgtgttattggaagagttttttctagtgctgaggcattggtacagagcttccggaaagttaaacaacacaccaaggaagaactgaaatctcttcaagcaaaagatgaagacaaagatgaagatgaaaaggaaaaagctgcatgttctgctgctgctatggaagaagactcagaagcatcttcctcaaggataggtgatagctcacagggagacaacaatttgcaaaaattaggccctgatgatgtgtctgtggatattgatgccattagaagggtctacaccagattgctctctaatgaaaaaattgaaactgcctttctcaatgcacttgtatatttgtcacctaacgtggaatgtgacttgacgtatcacaatgtatactctcgagatcctaattatctgaatttgttcattatcgtaatggagaatagaaatctccacagtcctgaatatctggaaatggctttgccattattttgcaaagcgatgagcaagctaccccttgcagcccaaggaaaactgatcagactgtggtctaaatacaatgcagaccagattcggagaatgatggagacatttcagcaacttattacttataaagtcataagcaatgaatttaacagtcgaaatctagtgaatgatgatgatgccattgttgctgcttcgaagtgcttgaaaatggtttactatgcaaatgtagtgggaggggaagtggacacaaatcacaatgaagaagatgatgaagagcccatccctgagtccagcgagctgacacttcaggaacttttgggagaagaaagaagaaacaagaaaggtcctcgagtggaccccctggaaactgaacttggtgttaaaaccctggattgtcgaaaaccacttatcccttttgaagagtttattaatgaaccactgaatgaggttctagaaatggataaagattatacttttttcaaagtagaaacagagaacaaattctcttttatgacatgtccctttatattgaatgctgtcacaaagaatttgggattatattatgacaatagaattcgcatgtacagtgaacgaagaatcactgttctctacagcttagttcaaggacagcagttgaatccatatttgagactcaaagttagacgtgaccatatcatagatgatgcacttgtccggctagagatgatcgctatggaaaatcctgcagacttgaagaagcagttgtatgtggaatttgaaggagaacaaggagttgatgagggaggtgtttccaaagaattttttcagctggttgtggaggaaatcttcaatccagatattggtatgttcacatacgatgaatctacaaaattgttttggtttaatccatcttcttttgaaactgagggtcagtttactctgattggcatagtactgggtctggctatttacaataactgtatactggatgtacattttcccatggttgtctacaggaagctaatggggaaaaaaggaacttttcgtgacttgggagactctcacccagttctatatcagagtttaaaagatttattggagtatgaagggaatgtggaagatgacatgatgatcactttccagatatcacagacagatctttttggtaacccaatgatgtatgatctaaaggaaaatggtgataaaattccaattacaaatgaaaacaggaaggaatttgtcaatctttattctgactacattctcaataaatcagtagaaaaacagttcaaggcttttcggagaggttttcatatggtgaccaatgaatctcccttaaagtacttattcagaccagaagaaattgaattgcttatatgtggaagccggaatctagatttccaagcactagaagaaactacagaatatgacggtggctataccagggactctgttctgattagggagttctgggaaatcgttcattcatttacagatgaacagaaaagactcttcttgcagtttacaacgggcacagacagagcacctgtgggaggactaggaaaattaaagatgattatagccaaaaatggcccagacacagaaaggttacctacatctcatacttgctttaatgtgcttttacttccggaatactcaagcaaagaaaaacttaaagagagattgttgaaggccatcacgtatgccaaaggatttggcatgctgtaaaacaaaacaaaacaaaataaaacaaaaaaaaggaaggaaaaaaaaagaaaaaatttaaaaaattttaaaaatataacgagggataaatttttggtggtgatagtgtcccagtacaaaaaggctgtaagatagtcaaccacagtagtcacctatgtctgtgcctcccttctttattggggacatgtgggctggaacagcagatttcagctacatatatgaacaaatcctttattattattataattatttttttgcgtgaaagtgttacatattctttcacttgtatgtacagagaggtttttctgaatatttattttaagggttaaatcacttttgcttgtgtttattactgcttgaggttgagccttttgagtatttaaaaaatatataccaacagaactactctcccaaggaaaatattgccaccatttgtagaccacgtaaccttcaagtatgtgctacttttttgtccctgtatctaactcaaatcaggaactgtattttttttaatgatttgcttttgaaacttgaagtcttgaaaacagtgtgatgcaattactgctgttctagcccccaaagagttttctgtgcaaaatcttgagaatcaatcaataaagaaagatggaaggaagggagaaattggaatgttttaactgcagccctcagaactttagtaacagcacaacaaattaaaaacaaaaacaactcatgccacagtatgtcgtcttcatgtgtcttgcaatgaactgtttcagtagccaatcctctttcttagtatatgaaaggacagggatttttgttcttgttgttctcgttgttgttttaagtttactggggaaagtgcatttggccaaatgaaatggtagtcaagcctattgcaacaaagttaggaagtttgttgtttgtttattataaacaaaaagcatgtgaaagtgcacttaagatagagtttttattaattacttacttattacctagattttaaatagacaatccaaagtctccccttcgtgttgccatcatcttgttgaatcagccattttatcgaggcacgtgatcagtgttgcaacataatgaaaaagatggctactgtgccttgtgttacttaatcatacagtaagctgacctggaaatgaatgaaactattactcctaagaattacattgtatagccccacagattaaatttaattaattaattcaaaacatgttaaacgttactttcatgtactatggaaaagtacaagtaggtttacattactgatttccagaagtaagtagtttcccctttcctagtcttctgtgtatgtgatgttgttaatttcttttattgcattataaaataaaaggattatgtatttttaactaaggtgagacattgatatatccttttgctacaagctatagctaatgtgctgagcttgtgccttggtgattgattgattgattgactgattgttttaactgattactgtagatcaacctgatgatttgtttgtttgaaattggcaggaaaaatgcagctttcaaatcattggggggagaaaaaggatgtctttcaggattattttaattaatttttttcataattgagacagaactgtttgttatgtaccataatgctaaataaaactgtggcacttttcaccataatttaatttagtggaaaaagaagacaatgctttccatattgtgataaggtaacatggggtttttctgggccagcctttagaacactgttagggtacatacgctaccttgatgaaagggaccttcgtgcaactgtagtcatcttaaaggcttctcatccactgtgcttcttaatgtgtaattaaagtgaggagaaattaaatactctgagggcgttttatataataaattcgtgaagaaatgtgtgctcttcagttctcaagttttattattatggtatttattaaagttctacaattgtaataacgtatccatatgacaagttttaaagtggtaattgaaataggttatcagatatagagttgttcacatcaagtagacttttaacagagtcagaatgaacctacccttaaaattttagagaaaaaaaatcgtcggttgcacagaatagctgctctagcttgcttaattatgccgggcatgttgtcactcctcttacttttgctgccttttcattactatttaatggaatgtccctgaacaataaggaagagcaaaacatagacattttgactacagtggatacttcctctaccccaaatgttatgttataaaagtactttttttgcccaggtactctattatatattttggttttctttgaattagacctcaatctccaggaagctctggagggaaaaaaaggaaccataaactaaagtaactggttttccaaataaatgtaaacttttttaaccttttattattatagaacatttcaaacatacataaaacatgaaaacagcctgcagccaaacttttctggaccttggcagctccagcaaatgagctggtcatcctaaccctggtttcctgagacaactacttttggggatgcttgcttgtatagggagatgatagatagatagatacatatcaaaaagaaacttgaaaaaggcttcgaacagaacttgccgatgttactcatccctcctcggtacagacattctgttagaacagatggttgtaatggggcagcatcactccctattcccattaaaaacatgaccattctgagatttcaggccccttcgaggaatttttctcaagaattccatacaaactgtcagaggaagaaatgtcgtcccaagactagtccctgtgtagtcttgatccctttacctgcttactgtaattttttttctctgactttccgccagtgtctaagggccatctgtacccctcccacccttccatgagccactgtataatccaaaaacacaccttccatttgctccctcacttgtctccttttacctcaacagtgttagtgtgtaaagaattgcctggggagggtagagggttttacaagtacagagtcccaagtcttttctcccctccccgttagtgggttggcatttattaataggcactgcaagattttgatgcaggtgtggggtagatatcactgtgaaaggctactaatgcatggtagtttcaccgaaagtacagtcttcaaggatccttataatctcctcattgccaaaatcagtaacatctataaccttgacaacaccctagcttgggctgttgcttctctggctacttgtttttccatcccagtttacccagattttagatggatactcctccaattctgcttaaagtccttacctgttcttgcccagttccctctagtcaacctcagtcactcccaaagattcttccccaatcccatatcttttgctcagacctctgtctctgggatttctttgttacctcatagtcagtagtcctaaaaacaaaattcttcatcttgcatctctatcgaccgaccattctttgtttctttttaagaaatgtaaccttcaccccaatcatcaaaatctctcattcctcaattgtcacaggttgtcacttctttccccctaaacctctcccatcattccttccttctttatactgcccttacaggtcctgatcctctgactcacccggacattcttagcagctgcctaatttcactccctgactctcatctccctcttccaatccttttcattgtgctagaacactatcttgctaattttaatatcctctgcattcagtgcctccacagattgccccctcactgacctttccaatttggccttgtgttacacactttcctcgctgcattcctacccagcatcttcacttgtcatatttctcaaatactcttcatgaccagatatttaaagtacctcatccatgaagacttcatcaacccccaaagtgcctccaatgcttccgtggtagcacagcataatggggtacatttcttagttgaacagtgaggagtcactgggattcttacagagtgtcttagggtctcctcttgatactctttccacatttcagttaaggaattttcttacatctttttttcttctaataacctttgcctggagtgtaagtaaattcatgatagagactgtcatttttaaaaaaaaaaacaaaccattttgcctttcacatgttattacctccatctttctgttatcttgtcagtgttgccacctaaatgattgaaaatgaccgagcatgcagtagaatgtagtgaagtttcctatttcatccattttttgcataagtgcattggtatctgtatatccatctgcccaagcaccagttgttgaaaagactattatttccccatgaatggtcctggtacccttgtcaaagaacagttgaccataaatataagactttctggattctcagtcttactccattgccctatatgtctgtcgttataccagcaccgcactgtcttgatggctgtagcttggtagtaagtttagatttgggatgtgcaagtcctccattttttttttttttttccccaaaatcattttgtctgttttgggtcccttgcattgcatatgaatttttatatgatcattgtgtcaattcctgcaaaacagctgggatcttgatagggatttagttgaattggtagataaatttgagaaataactgctattttaatggtgttaggttttctgttccatgactgtgggatgtctttgcatttgcttaggtctttatttcagtgatgttttagagatttcagtgtgcaagtcttgacgtctttaatttttttctaagtattttactgatgccactttaattatatgattattttctaatttttatttttgtattcatcactggtgttagaaataaaattaatttttgtatattgattttgtatattgtagcttttctaaaattctttttttgtcacttagtattttttgcatatgagatcatgcatctgtgaacagaaatacttttacttcttcctttccagtctagattcctattatttcattttcttgccttagtgtgctggctagcacctccagtacaatattggatagaagtgacaagagcagacatctttttcttgttcctgattttaaggggaaagcattcagtctttcaccattgagtatgatgttagctagctgtgggtttgcttcaagttgaggaaattcttttattaaacctagtttactgagtgttttttaatcaaaaaaaaaaaaaggaggggctgtgggttttgttaaatgcttcttctgtatcaagattttcatgttgttttgtcctttattaatatgttgtattaatggacttttgtatattgaattaactttgcattcctgggataatctcagttgtccatgctacataaaccttgttctatgctgctgga

SEQ ID NO: 664 - DNA, 8417 bp, Homo sapiens
  source 1..8417: mol_type = genomic DNA
agactgccatactgttttccacagtgactgcaccattttacattcccaccagcagtgaataagggttccaatttctctgcatcttttctaacacttgaggggaggtatggtgtcaagaaaacatagtcaccattattacgaaaagtaaaatatggaagagatgatccctaccatcaatcagcttacaactagaggcactgacaaatgtatacagatagctgtaatgttaaaaatctgtaagagcctgattttagaattcaccagctcctcagaagtttggcgaaatatgagttattaagcctacgctcagatcaaggtagcagctagactggtgtgacaacctgtttttaatcagtgactcaaagctgtgatcaccctgatgtcaccgaatggccacagcttgtaaaagatcaggagaacctcagtctgacgacattgaagctagccgaatgaagcgagcagctgcaaagcatctaatagaacgctactaccaccagttaactgagggctgtggaaatgaagcctgcacgaatgagttttgtgcttcctgtccaacttttcttcgtatggataataatgcagcagctattaaagccctcgagctttataagattaatgcaaaactctgtgatcctcatccctccaagaaaggagcaagctcagcttaccttgagaactcgaaaggtgcccccaacaactcctgctctgagataaaaatgaacaagaaaggcgctagaattgattttaaagatgtgacttacttaacagaagagaaggtatatgaaattcttgaattatgtagagaaagagaggattattcccctttaatccgtgttattggaagagttttttctagtgctgaggcattggtacagagcttccggaaagttaaacaacacaccaaggaagaactgaaatctcttcaagcaaaagatgaagacaaagatgaagatgaaaaggaaaaagctgcatgttctgctgctgctatggaagaagactcagaagcatcttcctcaaggataggtgatagctcacagggagacaacaatttgcaaaaattaggccctgatgatgtgtctgtggatattgatgccattagaagggtctacaccagattgctctctaatgaaaaaattgaaactgcctttctcaatgcacttgtatatttgtcacctaacgtggaatgtgacttgacgtatcacaatgtatactctcgagatcctaattatctgaatttgttcattatcgtaatggagaatagaaatctccacagtcctgaatatctggaaatggctttgccattattttgcaaagcgatgagcaagctaccccttgcagcccaaggaaaactgatcagactgtggtctaaatacaatgcagaccagattcggagaatgatggagacatttcagcaacttattacttataaagtcataagcaatgaatttaacagtcgaaatctagtgaatgatgatgatgccattgttgctgcttcgaagtgcttgaaaatggtttactatgcaaatgtagtgggaggggaagtggacacaaatcacaatgaagaagatgatgaagagcccatccctgagtccagcgagctgacacttcaggaacttttgggagaagaaagaagaaacaagaaaggtcctcgagtggaccccctggaaactgaacttggtgttaaaaccctggattgtcgaaaaccacttatcccttttgaagagtttattaatgaaccactgaatgaggttctagaaatggataaagattatacttttttcaaagtagaaacagagaacaaattctcttttatgacatgtccctttatattgaatgctgtcacaaagaatttgggattatattatgacaatagaattcgcatgtacagtgaacgaagaatcactgttctctacagcttagttcaaggacagcagttgaatccatatttgagactcaaagttagacgtgaccatatcatagatgatgcacttgtccggctagagatgatcgctatggaaaatcctgcagacttgaagaagcagttgtatgtggaatttgaaggagaacaaggagttgatgagggaggtgtttccaaagaattttttcagctggttgtggaggaaatcttcaatccagatattggtatgttcacatacgatgaatctacaaaattgttttggtttaatccatcttcttttgaaactgagggtcagtttactctgattggcatagtactgggtctggctatttacaataactgtatactggatgtacattttcccatggttgtctacaggaagctaatggggaaaaaaggaacttttcgtgacttgggagactctcacccagttctatatcagagtttaaaagatttattggagtatgaagggaatgtggaagatgacatgatgatcactttccagatatcacagacagatctttttggtaacccaatgatgtatgatctaaaggaaaatggtgataaaattccaattacaaatgaaaacaggaaggaatttgtcaatctttattctgactacattctcaataaatcagtagaaaaacagttcaaggcttttcggagaggttttcatatggtgaccaatgaatctcccttaaagtacttattcagaccagaagaaattgaattgcttatatgtggaagccggaatctagatttccaagcactagaagaaactacagaatatgacggtggctataccagggactctgttctgattagggagttctgggaaatcgttcattcatttacagatgaacagaaaagactcttcttgcagtttacaacgggcacagacagagcacctgtgggaggactaggaaaattaaagatgattatagccaaaaatggcccagacacagaaaggttacctacatctcatacttgctttaatgtgcttttacttccggaatactcaagcaaagaaaaacttaaagagagattgttgaaggccatcacgtatgccaaaggatttggcatgctgtaaaacaaaacaaaacaaaataaaacaaaaaaaaggaaggaaaaaaaaagaaaaaatttaaaaaattttaaaaatataacgagggataaatttttggtggtgatagtgtcccagtacaaaaaggctgtaagatagtcaaccacagtagtcacctatgtctgtgcctcccttctttattggggacatgtgggctggaacagcagatttcagctacatatatgaacaaatcctttattattattataattatttttttgcgtgaaagtgttacatattctttcacttgtatgtacagagaggtttttctgaatatttattttaagggttaaatcacttttgcttgtgtttattactgcttgaggttgagccttttgagtatttaaaaaatatataccaacagaactactctcccaaggaaaatattgccaccatttgtagaccacgtaaccttcaagtatgtgctacttttttgtccctgtatctaactcaaatcaggaactgtattttttttaatgatttgcttttgaaacttgaagtcttgaaaacagtgtgatgcaattactgctgttctagcccccaaagagttttctgtgcaaaatcttgagaatcaatcaataaagaaagatggaaggaagggagaaattggaatgttttaactgcagccctcagaactttagtaacagcacaacaaattaaaaacaaaaacaactcatgccacagtatgtcgtcttcatgtgtcttgcaatgaactgtttcagtagccaatcctctttcttagtatatgaaaggacagggatttttgttcttgttgttctcgttgttgttttaagtttactggggaaagtgcatttggccaaatgaaatggtagtcaagcctattgcaacaaagttaggaagtttgttgtttgtttattataaacaaaaagcatgtgaaagtgcacttaagatagagtttttattaattacttacttattacctagattttaaatagacaatccaaagtctccccttcgtgttgccatcatcttgttgaatcagccattttatcgaggcacgtgatcagtgttgcaacataatgaaaaagatggctactgtgccttgtgttacttaatcatacagtaagctgacctggaaatgaatgaaactattactcctaagaattacattgtatagccccacagattaaatttaattaattaattcaaaacatgttaaacgttactttcatgtactatggaaaagtacaagtaggtttacattactgatttccagaagtaagtagtttcccctttcctagtcttctgtgtatgtgatgttgttaatttcttttattgcattataaaataaaaggattatgtatttttaactaaggtgagacattgatatatccttttgctacaagctatagctaatgtgctgagcttgtgccttggtgattgattgattgattgactgattgttttaactgattactgtagatcaacctgatgatttgtttgtttgaaattggcaggaaaaatgcagctttcaaatcattggggggagaaaaaggatgtctttcaggattattttaattaatttttttcataattgagacagaactgtttgttatgtaccataatgctaaataaaactgtggcacttttcaccataatttaatttagtggaaaaagaagacaatgctttccatattgtgataaggtaacatggggtttttctgggccagcctttagaacactgttagggtacatacgctaccttgatgaaagggaccttcgtgcaactgtagtcatcttaaaggcttctcatccactgtgcttcttaatgtgtaattaaagtgaggagaaattaaatactctgagggcgttttatataataaattcgtgaagaaatgtgtgctcttcagttctcaagttttattattatggtatttattaaagttctacaattgtaataacgtatccatatgacaagttttaaagtggtaattgaaataggttatcagatatagagttgttcacatcaagtagacttttaacagagtcagaatgaacctacccttaaaattttagagaaaaaaaatcgtcggttgcacagaatagctgctctagcttgcttaattatgccgggcatgttgtcactcctcttacttttgctgccttttcattactatttaatggaatgtccctgaacaataaggaagagcaaaacatagacattttgactacagtggatacttcctctaccccaaatgttatgttataaaagtactttttttgcccaggtactctattatatattttggttttctttgaattagacctcaatctccaggaagctctggagggaaaaaaaggaaccataaactaaagtaactggttttccaaataaatgtaaacttttttaaccttttattattatagaacatttcaaacatacataaaacatgaaaacagcctgcagccaaacttttctggaccttggcagctccagcaaatgagctggtcatcctaaccctggtttcctgagacaactacttttggggatgcttgcttgtatagggagatgatagatagatagatacatatcaaaaagaaacttgaaaaaggcttcgaacagaacttgccgatgttactcatccctcctcggtacagacattctgttagaacagatggttgtaatggggcagcatcactccctattcccattaaaaacatgaccattctgagatttcaggccccttcgaggaatttttctcaagaattccatacaaactgtcagaggaagaaatgtcgtcccaagactagtccctgtgtagtcttgatccctttacctgcttactgtaattttttttctctgactttccgccagtgtctaagggccatctgtacccctcccacccttccatgagccactgtataatccaaaaacacaccttccatttgctccctcacttgtctccttttacctcaacagtgttagtgtgtaaagaattgcctggggagggtagagggttttacaagtacagagtcccaagtcttttctcccctccccgttagtgggttggcatttattaataggcactgcaagattttgatgcaggtgtggggtagatatcactgtgaaaggctactaatgcatggtagtttcaccgaaagtacagtcttcaaggatccttataatctcctcattgccaaaatcagtaacatctataaccttgacaacaccctagcttgggctgttgcttctctggctacttgtttttccatcccagtttacccagattttagatggatactcctccaattctgcttaaagtccttacctgttcttgcccagttccctctagtcaacctcagtcactcccaaagattcttccccaatcccatatcttttgctcagacctctgtctctgggatttctttgttacctcatagtcagtagtcctaaaaacaaaattcttcatcttgcatctctatcgaccgaccattctttgtttctttttaagaaatgtaaccttcaccccaatcatcaaaatctctcattcctcaattgtcacaggttgtcacttctttccccctaaacctctcccatcattccttccttctttatactgcccttacaggtcctgatcctctgactcacccggacattcttagcagctgcctaatttcactccctgactctcatctccctcttccaatccttttcattgtgctagaacactatcttgctaattttaatatcctctgcattcagtgcctccacagattgccccctcactgacctttccaatttggccttgtgttacacactttcctcgctgcattcctacccagcatcttcacttgtcatatttctcaaatactcttcatgaccagatatttaaagtacctcatccatgaagacttcatcaacccccaaagtgcctccaatgcttccgtggtagcacagcataatggggtacatttcttagttgaacagtgaggagtcactgggattcttacagagtgtcttagggtctcctcttgatactctttccacatttcagttaaggaattttcttacatctttttttcttctaataacctttgcctggagtgtaagtaaattcatgatagagactgtcatttttaaaaaaaaaaacaaaccattttgcctttcacatgttattacctccatctttctgttatcttgtcagtgttgccacctaaatgattgaaaatgaccgagcatgcagtagaatgtagtgaagtttcctatttcatccattttttgcataagtgcattggtatctgtatatccatctgcccaagcaccagttgttgaaaagactattatttccccatgaatggtcctggtacccttgtcaaagaacagttgaccataaatataagactttctggattctcagtcttactccattgccctatatgtctgtcgttataccagcaccgcactgtcttgatggctgtagcttggtagtaagtttagatttgggatgtgcaagtcctccattttttttttttttttccccaaaatcattttgtctgttttgggtcccttgcattgcatatgaatttttatatgatcattgtgtcaattcctgcaaaacagctgggatcttgatagggatttagttgaattggtagataaatttgagaaataactgctattttaatggtgttaggttttctgttccatgactgtgggatgtctttgcatttgcttaggtctttatttcagtgatgttttagagatttcagtgtgcaagtcttgacgtctttaatttttttctaagtattttactgatgccactttaattatatgattattttctaatttttatttttgtattcatcactggtgttagaaataaaattaatttttgtatattgattttgtatattgtagcttttctaaaattctttttttgtcacttagtattttttgcatatgagatcatgcatctgtgaacagaaatacttttacttcttcctttccagtctagattcctattatttcattttcttgccttagtgtgctggctagcacctccagtacaatattggatagaagtgacaagagcagacatctttttcttgttcctgattttaaggggaaagcattcagtctttcaccattgagtatgatgttagctagctgtgggtttgcttcaagttgaggaaattcttttattaaacctagtttactgagtgttttttaatcaaaaaaaaaaaaaggaggggctgtgggttttgttaaatgcttcttctgtatcaagattttcatgttgttttgtcctttattaatatgttgtattaatggacttttgtatattgaattaactttgcattcctgggataatctcagttgtccatgctacataaaccttgttctatgctgctgga

SEQ ID NO: 665 - DNA, 8482 bp, Homo sapiens
  source 1..8482: mol_type = genomic DNA
agactgccatactgttttccacagtgactgcaccattttacattcccaccagcagtgaataagggttccaatttctctgcatcttttctaacacttgaggggaggtatggtgtcaagaaaacatagtcaccattattacgaaaagtaaaatatggaagagatgatccctaccatcaatcagcttacaactagaggcactgacaaatgtatacagatagctgtaatgttaaaaatctgtaagagcctgattttagaattcaccagctcctcagaagtttggcgaaatatgagttattaagcctacgctcagatcaaggtagcagctagactggtgtgacaacctgtttttaatcagtgactcaaagctgtgatcaccctgatgtcaccgaatggccacagcttgtaaaagagagttacagtggaggtaaaaggagtggcttgcaggatggagaagctgcaccagtgttattggaaatcaggagaacctcagtctgacgacattgaagctagccgaatgaagcgagcagctgcaaagcatctaatagaacgctactaccaccagttaactgagggctgtggaaatgaagcctgcacgaatgagttttgtgcttcctgtccaacttttcttcgtatggataataatgcagcagctattaaagccctcgagctttataagattaatgcaaaactctgtgatcctcatccctccaagaaaggagcaagctcagcttaccttgagaactcgaaaggtgcccccaacaactcctgctctgagataaaaatgaacaagaaaggcgctagaattgattttaaagatgtgacttacttaacagaagagaaggtatatgaaattcttgaattatgtagagaaagagaggattattcccctttaatccgtgttattggaagagttttttctagtgctgaggcattggtacagagcttccggaaagttaaacaacacaccaaggaagaactgaaatctcttcaagcaaaagatgaagacaaagatgaagatgaaaaggaaaaagctgcatgttctgctgctgctatggaagaagactcagaagcatcttcctcaaggataggtgatagctcacagggagacaacaatttgcaaaaattaggccctgatgatgtgtctgtggatattgatgccattagaagggtctacaccagattgctctctaatgaaaaaattgaaactgcctttctcaatgcacttgtatatttgtcacctaacgtggaatgtgacttgacgtatcacaatgtatactctcgagatcctaattatctgaatttgttcattatcgtaatggagaatagaaatctccacagtcctgaatatctggaaatggctttgccattattttgcaaagcgatgagcaagctaccccttgcagcccaaggaaaactgatcagactgtggtctaaatacaatgcagaccagattcggagaatgatggagacatttcagcaacttattacttataaagtcataagcaatgaatttaacagtcgaaatctagtgaatgatgatgatgccattgttgctgcttcgaagtgcttgaaaatggtttactatgcaaatgtagtgggaggggaagtggacacaaatcacaatgaagaagatgatgaagagcccatccctgagtccagcgagctgacacttcaggaacttttgggagaagaaagaagaaacaagaaaggtcctcgagtggaccccctggaaactgaacttggtgttaaaaccctggattgtcgaaaaccacttatcccttttgaagagtttattaatgaaccactgaatgaggttctagaaatggataaagattatacttttttcaaagtagaaacagagaacaaattctcttttatgacatgtccctttatattgaatgctgtcacaaagaatttgggattatattatgacaatagaattcgcatgtacagtgaacgaagaatcactgttctctacagcttagttcaaggacagcagttgaatccatatttgagactcaaagttagacgtgaccatatcatagatgatgcacttgtccggctagagatgatcgctatggaaaatcctgcagacttgaagaagcagttgtatgtggaatttgaaggagaacaaggagttgatgagggaggtgtttccaaagaattttttcagctggttgtggaggaaatcttcaatccagatattggtatgttcacatacgatgaatctacaaaattgttttggtttaatccatcttcttttgaaactgagggtcagtttactctgattggcatagtactgggtctggctatttacaataactgtatactggatgtacattttcccatggttgtctacaggaagctaatggggaaaaaaggaacttttcgtgacttgggagactctcacccagttctatatcagagtttaaaagatttattggagtatgaagggaatgtggaagatgacatgatgatcactttccagatatcacagacagatctttttggtaacccaatgatgtatgatctaaaggaaaatggtgataaaattccaattacaaatgaaaacaggaaggaatttgtcaatctttattctgactacattctcaataaatcagtagaaaaacagttcaaggcttttcggagaggttttcatatggtgaccaatgaatctcccttaaagtacttattcagaccagaagaaattgaattgcttatatgtggaagccggaatctagatttccaagcactagaagaaactacagaatatgacggtggctataccagggactctgttctgattagggagttctgggaaatcgttcattcatttacagatgaacagaaaagactcttcttgcagtttacaacgggcacagacagagcacctgtgggaggactaggaaaattaaagatgattatagccaaaaatggcccagacacagaaaggttacctacatctcatacttgctttaatgtgcttttacttccggaatactcaagcaaagaaaaacttaaagagagattgttgaaggccatcacgtatgccaaaggatttggcatgctgtaaaacaaaacaaaacaaaataaaacaaaaaaaaggaaggaaaaaaaaagaaaaaatttaaaaaattttaaaaatataacgagggataaatttttggtggtgatagtgtcccagtacaaaaaggctgtaagatagtcaaccacagtagtcacctatgtctgtgcctcccttctttattggggacatgtgggctggaacagcagatttcagctacatatatgaacaaatcctttattattattataattatttttttgcgtgaaagtgttacatattctttcacttgtatgtacagagaggtttttctgaatatttattttaagggttaaatcacttttgcttgtgtttattactgcttgaggttgagccttttgagtatttaaaaaatatataccaacagaactactctcccaaggaaaatattgccaccatttgtagaccacgtaaccttcaagtatgtgctacttttttgtccctgtatctaactcaaatcaggaactgtattttttttaatgatttgcttttgaaacttgaagtcttgaaaacagtgtgatgcaattactgctgttctagcccccaaagagttttctgtgcaaaatcttgagaatcaatcaataaagaaagatggaaggaagggagaaattggaatgttttaactgcagccctcagaactttagtaacagcacaacaaattaaaaacaaaaacaactcatgccacagtatgtcgtcttcatgtgtcttgcaatgaactgtttcagtagccaatcctctttcttagtatatgaaaggacagggatttttgttcttgttgttctcgttgttgttttaagtttactggggaaagtgcatttggccaaatgaaatggtagtcaagcctattgcaacaaagttaggaagtttgttgtttgtttattataaacaaaaagcatgtgaaagtgcacttaagatagagtttttattaattacttacttattacctagattttaaatagacaatccaaagtctccccttcgtgttgccatcatcttgttgaatcagccattttatcgaggcacgtgatcagtgttgcaacataatgaaaaagatggctactgtgccttgtgttacttaatcatacagtaagctgacctggaaatgaatgaaactattactcctaagaattacattgtatagccccacagattaaatttaattaattaattcaaaacatgttaaacgttactttcatgtactatggaaaagtacaagtaggtttacattactgatttccagaagtaagtagtttcccctttcctagtcttctgtgtatgtgatgttgttaatttcttttattgcattataaaataaaaggattatgtatttttaactaaggtgagacattgatatatccttttgctacaagctatagctaatgtgctgagcttgtgccttggtgattgattgattgattgactgattgttttaactgattactgtagatcaacctgatgatttgtttgtttgaaattggcaggaaaaatgcagctttcaaatcattggggggagaaaaaggatgtctttcaggattattttaattaatttttttcataattgagacagaactgtttgttatgtaccataatgctaaataaaactgtggcacttttcaccataatttaatttagtggaaaaagaagacaatgctttccatattgtgataaggtaacatggggtttttctgggccagcctttagaacactgttagggtacatacgctaccttgatgaaagggaccttcgtgcaactgtagtcatcttaaaggcttctcatccactgtgcttcttaatgtgtaattaaagtgaggagaaattaaatactctgagggcgttttatataataaattcgtgaagaaatgtgtgctcttcagttctcaagttttattattatggtatttattaaagttctacaattgtaataacgtatccatatgacaagttttaaagtggtaattgaaataggttatcagatatagagttgttcacatcaagtagacttttaacagagtcagaatgaacctacccttaaaattttagagaaaaaaaatcgtcggttgcacagaatagctgctctagcttgcttaattatgccgggcatgttgtcactcctcttacttttgctgccttttcattactatttaatggaatgtccctgaacaataaggaagagcaaaacatagacattttgactacagtggatacttcctctaccccaaatgttatgttataaaagtactttttttgcccaggtactctattatatattttggttttctttgaattagacctcaatctccaggaagctctggagggaaaaaaaggaaccataaactaaagtaactggttttccaaataaatgtaaacttttttaaccttttattattatagaacatttcaaacatacataaaacatgaaaacagcctgcagccaaacttttctggaccttggcagctccagcaaatgagctggtcatcctaaccctggtttcctgagacaactacttttggggatgcttgcttgtatagggagatgatagatagatagatacatatcaaaaagaaacttgaaaaaggcttcgaacagaacttgccgatgttactcatccctcctcggtacagacattctgttagaacagatggttgtaatggggcagcatcactccctattcccattaaaaacatgaccattctgagatttcaggccccttcgaggaatttttctcaagaattccatacaaactgtcagaggaagaaatgtcgtcccaagactagtccctgtgtagtcttgatccctttacctgcttactgtaattttttttctctgactttccgccagtgtctaagggccatctgtacccctcccacccttccatgagccactgtataatccaaaaacacaccttccatttgctccctcacttgtctccttttacctcaacagtgttagtgtgtaaagaattgcctggggagggtagagggttttacaagtacagagtcccaagtcttttctcccctccccgttagtgggttggcatttattaataggcactgcaagattttgatgcaggtgtggggtagatatcactgtgaaaggctactaatgcatggtagtttcaccgaaagtacagtcttcaaggatccttataatctcctcattgccaaaatcagtaacatctataaccttgacaacaccctagcttgggctgttgcttctctggctacttgtttttccatcccagtttacccagattttagatggatactcctccaattctgcttaaagtccttacctgttcttgcccagttccctctagtcaacctcagtcactcccaaagattcttccccaatcccatatcttttgctcagacctctgtctctgggatttctttgttacctcatagtcagtagtcctaaaaacaaaattcttcatcttgcatctctatcgaccgaccattctttgtttctttttaagaaatgtaaccttcaccccaatcatcaaaatctctcattcctcaattgtcacaggttgtcacttctttccccctaaacctctcccatcattccttccttctttatactgcccttacaggtcctgatcctctgactcacccggacattcttagcagctgcctaatttcactccctgactctcatctccctcttccaatccttttcattgtgctagaacactatcttgctaattttaatatcctctgcattcagtgcctccacagattgccccctcactgacctttccaatttggccttgtgttacacactttcctcgctgcattcctacccagcatcttcacttgtcatatttctcaaatactcttcatgaccagatatttaaagtacctcatccatgaagacttcatcaacccccaaagtgcctccaatgcttccgtggtagcacagcataatggggtacatttcttagttgaacagtgaggagtcactgggattcttacagagtgtcttagggtctcctcttgatactctttccacatttcagttaaggaattttcttacatctttttttcttctaataacctttgcctggagtgtaagtaaattcatgatagagactgtcatttttaaaaaaaaaaacaaaccattttgcctttcacatgttattacctccatctttctgttatcttgtcagtgttgccacctaaatgattgaaaatgaccgagcatgcagtagaatgtagtgaagtttcctatttcatccattttttgcataagtgcattggtatctgtatatccatctgcccaagcaccagttgttgaaaagactattatttccccatgaatggtcctggtacccttgtcaaagaacagttgaccataaatataagactttctggattctcagtcttactccattgccctatatgtctgtcgttataccagcaccgcactgtcttgatggctgtagcttggtagtaagtttagatttgggatgtgcaagtcctccattttttttttttttttccccaaaatcattttgtctgttttgggtcccttgcattgcatatgaatttttatatgatcattgtgtcaattcctgcaaaacagctgggatcttgatagggatttagttgaattggtagataaatttgagaaataactgctattttaatggtgttaggttttctgttccatgactgtgggatgtctttgcatttgcttaggtctttatttcagtgatgttttagagatttcagtgtgcaagtcttgacgtctttaatttttttctaagtattttactgatgccactttaattatatgattattttctaatttttatttttgtattcatcactggtgttagaaataaaattaatttttgtatattgattttgtatattgtagcttttctaaaattctttttttgtcacttagtattttttgcatatgagatcatgcatctgtgaacagaaatacttttacttcttcctttccagtctagattcctattatttcattttcttgccttagtgtgctggctagcacctccagtacaatattggatagaagtgacaagagcagacatctttttcttgttcctgattttaaggggaaagcattcagtctttcaccattgagtatgatgttagctagctgtgggtttgcttcaagttgaggaaattcttttattaaacctagtttactgagtgttttttaatcaaaaaaaaaaaaaggaggggctgtgggttttgttaaatgcttcttctgtatcaagattttcatgttgttttgtcctttattaatatgttgtattaatggacttttgtatattgaattaactttgcattcctgggataatctcagttgtccatgctacataaaccttgttctatgctgctgga

SEQ ID NO: 666 - DNA, 8302 bp, Homo sapiens
  source 1..8302: mol_type = genomic DNA
agactgccatactgttttccacagtgactgcaccattttacattcccaccagcagtgaataagggttccaatttctctgcatcttttctaacacttgaggggaggtatggtgtcaagaaaacatagtcaccattattacgaaaagtaaaatatggaagagatgatccctaccatcaatcagcttacaactagaggcactgacaaatgtatacagatagctgtaatgtaaggttaaaaatctgtaagagcctgattttagaattcaccagctcctcagaagtttggcgaaatatgatcaggagaacctcagtctgacgacattgaagctagccgaatgaagcgagcagctgcaaagcatctaatagaacgctactaccaccagttaactgagggctgtggaaatgaagcctgcacgaatgagttttgtgcttcctgtccaacttttcttcgtatggataataatgcagcagctattaaagccctcgagctttataagattaatgcaaaactctgtgatcctcatccctccaagaaaggagcaagctcagcttaccttgagaactcgaaaggtgcccccaacaactcctgctctgagataaaaatgaacaagaaaggcgctagaattgattttaaagatgtgacttacttaacagaagagaaggtatatgaaattcttgaattatgtagagaaagagaggattattcccctttaatccgtgttattggaagagttttttctagtgctgaggcattggtacagagcttccggaaagttaaacaacacaccaaggaagaactgaaatctcttcaagcaaaagatgaagacaaagatgaagatgaaaaggaaaaagctgcatgttctgctgctgctatggaagaagactcagaagcatcttcctcaaggataggtgatagctcacagggagacaacaatttgcaaaaattaggccctgatgatgtgtctgtggatattgatgccattagaagggtctacaccagattgctctctaatgaaaaaattgaaactgcctttctcaatgcacttgtatatttgtcacctaacgtggaatgtgacttgacgtatcacaatgtatactctcgagatcctaattatctgaatttgttcattatcgtaatggagaatagaaatctccacagtcctgaatatctggaaatggctttgccattattttgcaaagcgatgagcaagctaccccttgcagcccaaggaaaactgatcagactgtggtctaaatacaatgcagaccagattcggagaatgatggagacatttcagcaacttattacttataaagtcataagcaatgaatttaacagtcgaaatctagtgaatgatgatgatgccattgttgctgcttcgaagtgcttgaaaatggtttactatgcaaatgtagtgggaggggaagtggacacaaatcacaatgaagaagatgatgaagagcccatccctgagtccagcgagctgacacttcaggaacttttgggagaagaaagaagaaacaagaaaggtcctcgagtggaccccctggaaactgaacttggtgttaaaaccctggattgtcgaaaaccacttatcccttttgaagagtttattaatgaaccactgaatgaggttctagaaatggataaagattatacttttttcaaagtagaaacagagaacaaattctcttttatgacatgtccctttatattgaatgctgtcacaaagaatttgggattatattatgacaatagaattcgcatgtacagtgaacgaagaatcactgttctctacagcttagttcaaggacagcagttgaatccatatttgagactcaaagttagacgtgaccatatcatagatgatgcacttgtccggctagagatgatcgctatggaaaatcctgcagacttgaagaagcagttgtatgtggaatttgaaggagaacaaggagttgatgagggaggtgtttccaaagaattttttcagctggttgtggaggaaatcttcaatccagatattggtatgttcacatacgatgaatctacaaaattgttttggtttaatccatcttcttttgaaactgagggtcagtttactctgattggcatagtactgggtctggctatttacaataactgtatactggatgtacattttcccatggttgtctacaggaagctaatggggaaaaaaggaacttttcgtgacttgggagactctcacccagttctatatcagagtttaaaagatttattggagtatgaagggaatgtggaagatgacatgatgatcactttccagatatcacagacagatctttttggtaacccaatgatgtatgatctaaaggaaaatggtgataaaattccaattacaaatgaaaacaggaaggaatttgtcaatctttattctgactacattctcaataaatcagtagaaaaacagttcaaggcttttcggagaggttttcatatggtgaccaatgaatctcccttaaagtacttattcagaccagaagaaattgaattgcttatatgtggaagccggaatctagatttccaagcactagaagaaactacagaatatgacggtggctataccagggactctgttctgattagggagttctgggaaatcgttcattcatttacagatgaacagaaaagactcttcttgcagtttacaacgggcacagacagagcacctgtgggaggactaggaaaattaaagatgattatagccaaaaatggcccagacacagaaaggttacctacatctcatacttgctttaatgtgcttttacttccggaatactcaagcaaagaaaaacttaaagagagattgttgaaggccatcacgtatgccaaaggatttggcatgctgtaaaacaaaacaaaacaaaataaaacaaaaaaaaggaaggaaaaaaaaagaaaaaatttaaaaaattttaaaaatataacgagggataaatttttggtggtgatagtgtcccagtacaaaaaggctgtaagatagtcaaccacagtagtcacctatgtctgtgcctcccttctttattggggacatgtgggctggaacagcagatttcagctacatatatgaacaaatcctttattattattataattatttttttgcgtgaaagtgttacatattctttcacttgtatgtacagagaggtttttctgaatatttattttaagggttaaatcacttttgcttgtgtttattactgcttgaggttgagccttttgagtatttaaaaaatatataccaacagaactactctcccaaggaaaatattgccaccatttgtagaccacgtaaccttcaagtatgtgctacttttttgtccctgtatctaactcaaatcaggaactgtattttttttaatgatttgcttttgaaacttgaagtcttgaaaacagtgtgatgcaattactgctgttctagcccccaaagagttttctgtgcaaaatcttgagaatcaatcaataaagaaagatggaaggaagggagaaattggaatgttttaactgcagccctcagaactttagtaacagcacaacaaattaaaaacaaaaacaactcatgccacagtatgtcgtcttcatgtgtcttgcaatgaactgtttcagtagccaatcctctttcttagtatatgaaaggacagggatttttgttcttgttgttctcgttgttgttttaagtttactggggaaagtgcatttggccaaatgaaatggtagtcaagcctattgcaacaaagttaggaagtttgttgtttgtttattataaacaaaaagcatgtgaaagtgcacttaagatagagtttttattaattacttacttattacctagattttaaatagacaatccaaagtctccccttcgtgttgccatcatcttgttgaatcagccattttatcgaggcacgtgatcagtgttgcaacataatgaaaaagatggctactgtgccttgtgttacttaatcatacagtaagctgacctggaaatgaatgaaactattactcctaagaattacattgtatagccccacagattaaatttaattaattaattcaaaacatgttaaacgttactttcatgtactatggaaaagtacaagtaggtttacattactgatttccagaagtaagtagtttcccctttcctagtcttctgtgtatgtgatgttgttaatttcttttattgcattataaaataaaaggattatgtatttttaactaaggtgagacattgatatatccttttgctacaagctatagctaatgtgctgagcttgtgccttggtgattgattgattgattgactgattgttttaactgattactgtagatcaacctgatgatttgtttgtttgaaattggcaggaaaaatgcagctttcaaatcattggggggagaaaaaggatgtctttcaggattattttaattaatttttttcataattgagacagaactgtttgttatgtaccataatgctaaataaaactgtggcacttttcaccataatttaatttagtggaaaaagaagacaatgctttccatattgtgataaggtaacatggggtttttctgggccagcctttagaacactgttagggtacatacgctaccttgatgaaagggaccttcgtgcaactgtagtcatcttaaaggcttctcatccactgtgcttcttaatgtgtaattaaagtgaggagaaattaaatactctgagggcgttttatataataaattcgtgaagaaatgtgtgctcttcagttctcaagttttattattatggtatttattaaagttctacaattgtaataacgtatccatatgacaagttttaaagtggtaattgaaataggttatcagatatagagttgttcacatcaagtagacttttaacagagtcagaatgaacctacccttaaaattttagagaaaaaaaatcgtcggttgcacagaatagctgctctagcttgcttaattatgccgggcatgttgtcactcctcttacttttgctgccttttcattactatttaatggaatgtccctgaacaataaggaagagcaaaacatagacattttgactacagtggatacttcctctaccccaaatgttatgttataaaagtactttttttgcccaggtactctattatatattttggttttctttgaattagacctcaatctccaggaagctctggagggaaaaaaaggaaccataaactaaagtaactggttttccaaataaatgtaaacttttttaaccttttattattatagaacatttcaaacatacataaaacatgaaaacagcctgcagccaaacttttctggaccttggcagctccagcaaatgagctggtcatcctaaccctggtttcctgagacaactacttttggggatgcttgcttgtatagggagatgatagatagatagatacatatcaaaaagaaacttgaaaaaggcttcgaacagaacttgccgatgttactcatccctcctcggtacagacattctgttagaacagatggttgtaatggggcagcatcactccctattcccattaaaaacatgaccattctgagatttcaggccccttcgaggaatttttctcaagaattccatacaaactgtcagaggaagaaatgtcgtcccaagactagtccctgtgtagtcttgatccctttacctgcttactgtaattttttttctctgactttccgccagtgtctaagggccatctgtacccctcccacccttccatgagccactgtataatccaaaaacacaccttccatttgctccctcacttgtctccttttacctcaacagtgttagtgtgtaaagaattgcctggggagggtagagggttttacaagtacagagtcccaagtcttttctcccctccccgttagtgggttggcatttattaataggcactgcaagattttgatgcaggtgtggggtagatatcactgtgaaaggctactaatgcatggtagtttcaccgaaagtacagtcttcaaggatccttataatctcctcattgccaaaatcagtaacatctataaccttgacaacaccctagcttgggctgttgcttctctggctacttgtttttccatcccagtttacccagattttagatggatactcctccaattctgcttaaagtccttacctgttcttgcccagttccctctagtcaacctcagtcactcccaaagattcttccccaatcccatatcttttgctcagacctctgtctctgggatttctttgttacctcatagtcagtagtcctaaaaacaaaattcttcatcttgcatctctatcgaccgaccattctttgtttctttttaagaaatgtaaccttcaccccaatcatcaaaatctctcattcctcaattgtcacaggttgtcacttctttccccctaaacctctcccatcattccttccttctttatactgcccttacaggtcctgatcctctgactcacccggacattcttagcagctgcctaatttcactccctgactctcatctccctcttccaatccttttcattgtgctagaacactatcttgctaattttaatatcctctgcattcagtgcctccacagattgccccctcactgacctttccaatttggccttgtgttacacactttcctcgctgcattcctacccagcatcttcacttgtcatatttctcaaatactcttcatgaccagatatttaaagtacctcatccatgaagacttcatcaacccccaaagtgcctccaatgcttccgtggtagcacagcataatggggtacatttcttagttgaacagtgaggagtcactgggattcttacagagtgtcttagggtctcctcttgatactctttccacatttcagttaaggaattttcttacatctttttttcttctaataacctttgcctggagtgtaagtaaattcatgatagagactgtcatttttaaaaaaaaaaacaaaccattttgcctttcacatgttattacctccatctttctgttatcttgtcagtgttgccacctaaatgattgaaaatgaccgagcatgcagtagaatgtagtgaagtttcctatttcatccattttttgcataagtgcattggtatctgtatatccatctgcccaagcaccagttgttgaaaagactattatttccccatgaatggtcctggtacccttgtcaaagaacagttgaccataaatataagactttctggattctcagtcttactccattgccctatatgtctgtcgttataccagcaccgcactgtcttgatggctgtagcttggtagtaagtttagatttgggatgtgcaagtcctccattttttttttttttttccccaaaatcattttgtctgttttgggtcccttgcattgcatatgaatttttatatgatcattgtgtcaattcctgcaaaacagctgggatcttgatagggatttagttgaattggtagataaatttgagaaataactgctattttaatggtgttaggttttctgttccatgactgtgggatgtctttgcatttgcttaggtctttatttcagtgatgttttagagatttcagtgtgcaagtcttgacgtctttaatttttttctaagtattttactgatgccactttaattatatgattattttctaatttttatttttgtattcatcactggtgttagaaataaaattaatttttgtatattgattttgtatattgtagcttttctaaaattctttttttgtcacttagtattttttgcatatgagatcatgcatctgtgaacagaaatacttttacttcttcctttccagtctagattcctattatttcattttcttgccttagtgtgctggctagcacctccagtacaatattggatagaagtgacaagagcagacatctttttcttgttcctgattttaaggggaaagcattcagtctttcaccattgagtatgatgttagctagctgtgggtttgcttcaagttgaggaaattcttttattaaacctagtttactgagtgttttttaatcaaaaaaaaaaaaaggaggggctgtgggttttgttaaatgcttcttctgtatcaagattttcatgttgttttgtcctttattaatatgttgtattaatggacttttgtatattgaattaactttgcattcctgggataatctcagttgtccatgctacataaaccttgttctatgctgctgga

SEQ ID NO: 667 - DNA, 8422 bp, Homo sapiens
  source 1..8422: mol_type = genomic DNA
agactgccatactgttttccacagtgactgcaccattttacattcccaccagcagtgaataagggttccaatttctctgcatcttttctaacacttgaggggaggtatggtgtcaagaaaacatagtcaccattattacgaaaagtaaaatatggaagagatgatccctaccatcaatcagcttacaactagaggcactgacaaatgtatacagatagctgtaatgtaaggttaaaaatctgtaagagcctgattttagaattcaccagctcctcagaagtttggcgaaatatgagttattaagcctacgctcagatcaaggtagcagctagactggtgtgacaacctgtttttaatcagtgactcaaagctgtgatcaccctgatgtcaccgaatggccacagcttgtaaaagatcaggagaacctcagtctgacgacattgaagctagccgaatgaagcgagcagctgcaaagcatctaatagaacgctactaccaccagttaactgagggctgtggaaatgaagcctgcacgaatgagttttgtgcttcctgtccaacttttcttcgtatggataataatgcagcagctattaaagccctcgagctttataagattaatgcaaaactctgtgatcctcatccctccaagaaaggagcaagctcagcttaccttgagaactcgaaaggtgcccccaacaactcctgctctgagataaaaatgaacaagaaaggcgctagaattgattttaaagatgtgacttacttaacagaagagaaggtatatgaaattcttgaattatgtagagaaagagaggattattcccctttaatccgtgttattggaagagttttttctagtgctgaggcattggtacagagcttccggaaagttaaacaacacaccaaggaagaactgaaatctcttcaagcaaaagatgaagacaaagatgaagatgaaaaggaaaaagctgcatgttctgctgctgctatggaagaagactcagaagcatcttcctcaaggataggtgatagctcacagggagacaacaatttgcaaaaattaggccctgatgatgtgtctgtggatattgatgccattagaagggtctacaccagattgctctctaatgaaaaaattgaaactgcctttctcaatgcacttgtatatttgtcacctaacgtggaatgtgacttgacgtatcacaatgtatactctcgagatcctaattatctgaatttgttcattatcgtaatggagaatagaaatctccacagtcctgaatatctggaaatggctttgccattattttgcaaagcgatgagcaagctaccccttgcagcccaaggaaaactgatcagactgtggtctaaatacaatgcagaccagattcggagaatgatggagacatttcagcaacttattacttataaagtcataagcaatgaatttaacagtcgaaatctagtgaatgatgatgatgccattgttgctgcttcgaagtgcttgaaaatggtttactatgcaaatgtagtgggaggggaagtggacacaaatcacaatgaagaagatgatgaagagcccatccctgagtccagcgagctgacacttcaggaacttttgggagaagaaagaagaaacaagaaaggtcctcgagtggaccccctggaaactgaacttggtgttaaaaccctggattgtcgaaaaccacttatcccttttgaagagtttattaatgaaccactgaatgaggttctagaaatggataaagattatacttttttcaaagtagaaacagagaacaaattctcttttatgacatgtccctttatattgaatgctgtcacaaagaatttgggattatattatgacaatagaattcgcatgtacagtgaacgaagaatcactgttctctacagcttagttcaaggacagcagttgaatccatatttgagactcaaagttagacgtgaccatatcatagatgatgcacttgtccggctagagatgatcgctatggaaaatcctgcagacttgaagaagcagttgtatgtggaatttgaaggagaacaaggagttgatgagggaggtgtttccaaagaattttttcagctggttgtggaggaaatcttcaatccagatattggtatgttcacatacgatgaatctacaaaattgttttggtttaatccatcttcttttgaaactgagggtcagtttactctgattggcatagtactgggtctggctatttacaataactgtatactggatgtacattttcccatggttgtctacaggaagctaatggggaaaaaaggaacttttcgtgacttgggagactctcacccagttctatatcagagtttaaaagatttattggagtatgaagggaatgtggaagatgacatgatgatcactttccagatatcacagacagatctttttggtaacccaatgatgtatgatctaaaggaaaatggtgataaaattccaattacaaatgaaaacaggaaggaatttgtcaatctttattctgactacattctcaataaatcagtagaaaaacagttcaaggcttttcggagaggttttcatatggtgaccaatgaatctcccttaaagtacttattcagaccagaagaaattgaattgcttatatgtggaagccggaatctagatttccaagcactagaagaaactacagaatatgacggtggctataccagggactctgttctgattagggagttctgggaaatcgttcattcatttacagatgaacagaaaagactcttcttgcagtttacaacgggcacagacagagcacctgtgggaggactaggaaaattaaagatgattatagccaaaaatggcccagacacagaaaggttacctacatctcatacttgctttaatgtgcttttacttccggaatactcaagcaaagaaaaacttaaagagagattgttgaaggccatcacgtatgccaaaggatttggcatgctgtaaaacaaaacaaaacaaaataaaacaaaaaaaaggaaggaaaaaaaaagaaaaaatttaaaaaattttaaaaatataacgagggataaatttttggtggtgatagtgtcccagtacaaaaaggctgtaagatagtcaaccacagtagtcacctatgtctgtgcctcccttctttattggggacatgtgggctggaacagcagatttcagctacatatatgaacaaatcctttattattattataattatttttttgcgtgaaagtgttacatattctttcacttgtatgtacagagaggtttttctgaatatttattttaagggttaaatcacttttgcttgtgtttattactgcttgaggttgagccttttgagtatttaaaaaatatataccaacagaactactctcccaaggaaaatattgccaccatttgtagaccacgtaaccttcaagtatgtgctacttttttgtccctgtatctaactcaaatcaggaactgtattttttttaatgatttgcttttgaaacttgaagtcttgaaaacagtgtgatgcaattactgctgttctagcccccaaagagttttctgtgcaaaatcttgagaatcaatcaataaagaaagatggaaggaagggagaaattggaatgttttaactgcagccctcagaactttagtaacagcacaacaaattaaaaacaaaaacaactcatgccacagtatgtcgtcttcatgtgtcttgcaatgaactgtttcagtagccaatcctctttcttagtatatgaaaggacagggatttttgttcttgttgttctcgttgttgttttaagtttactggggaaagtgcatttggccaaatgaaatggtagtcaagcctattgcaacaaagttaggaagtttgttgtttgtttattataaacaaaaagcatgtgaaagtgcacttaagatagagtttttattaattacttacttattacctagattttaaatagacaatccaaagtctccccttcgtgttgccatcatcttgttgaatcagccattttatcgaggcacgtgatcagtgttgcaacataatgaaaaagatggctactgtgccttgtgttacttaatcatacagtaagctgacctggaaatgaatgaaactattactcctaagaattacattgtatagccccacagattaaatttaattaattaattcaaaacatgttaaacgttactttcatgtactatggaaaagtacaagtaggtttacattactgatttccagaagtaagtagtttcccctttcctagtcttctgtgtatgtgatgttgttaatttcttttattgcattataaaataaaaggattatgtatttttaactaaggtgagacattgatatatccttttgctacaagctatagctaatgtgctgagcttgtgccttggtgattgattgattgattgactgattgttttaactgattactgtagatcaacctgatgatttgtttgtttgaaattggcaggaaaaatgcagctttcaaatcattggggggagaaaaaggatgtctttcaggattattttaattaatttttttcataattgagacagaactgtttgttatgtaccataatgctaaataaaactgtggcacttttcaccataatttaatttagtggaaaaagaagacaatgctttccatattgtgataaggtaacatggggtttttctgggccagcctttagaacactgttagggtacatacgctaccttgatgaaagggaccttcgtgcaactgtagtcatcttaaaggcttctcatccactgtgcttcttaatgtgtaattaaagtgaggagaaattaaatactctgagggcgttttatataataaattcgtgaagaaatgtgtgctcttcagttctcaagttttattattatggtatttattaaagttctacaattgtaataacgtatccatatgacaagttttaaagtggtaattgaaataggttatcagatatagagttgttcacatcaagtagacttttaacagagtcagaatgaacctacccttaaaattttagagaaaaaaaatcgtcggttgcacagaatagctgctctagcttgcttaattatgccgggcatgttgtcactcctcttacttttgctgccttttcattactatttaatggaatgtccctgaacaataaggaagagcaaaacatagacattttgactacagtggatacttcctctaccccaaatgttatgttataaaagtactttttttgcccaggtactctattatatattttggttttctttgaattagacctcaatctccaggaagctctggagggaaaaaaaggaaccataaactaaagtaactggttttccaaataaatgtaaacttttttaaccttttattattatagaacatttcaaacatacataaaacatgaaaacagcctgcagccaaacttttctggaccttggcagctccagcaaatgagctggtcatcctaaccctggtttcctgagacaactacttttggggatgcttgcttgtatagggagatgatagatagatagatacatatcaaaaagaaacttgaaaaaggcttcgaacagaacttgccgatgttactcatccctcctcggtacagacattctgttagaacagatggttgtaatggggcagcatcactccctattcccattaaaaacatgaccattctgagatttcaggccccttcgaggaatttttctcaagaattccatacaaactgtcagaggaagaaatgtcgtcccaagactagtccctgtgtagtcttgatccctttacctgcttactgtaattttttttctctgactttccgccagtgtctaagggccatctgtacccctcccacccttccatgagccactgtataatccaaaaacacaccttccatttgctccctcacttgtctccttttacctcaacagtgttagtgtgtaaagaattgcctggggagggtagagggttttacaagtacagagtcccaagtcttttctcccctccccgttagtgggttggcatttattaataggcactgcaagattttgatgcaggtgtggggtagatatcactgtgaaaggctactaatgcatggtagtttcaccgaaagtacagtcttcaaggatccttataatctcctcattgccaaaatcagtaacatctataaccttgacaacaccctagcttgggctgttgcttctctggctacttgtttttccatcccagtttacccagattttagatggatactcctccaattctgcttaaagtccttacctgttcttgcccagttccctctagtcaacctcagtcactcccaaagattcttccccaatcccatatcttttgctcagacctctgtctctgggatttctttgttacctcatagtcagtagtcctaaaaacaaaattcttcatcttgcatctctatcgaccgaccattctttgtttctttttaagaaatgtaaccttcaccccaatcatcaaaatctctcattcctcaattgtcacaggttgtcacttctttccccctaaacctctcccatcattccttccttctttatactgcccttacaggtcctgatcctctgactcacccggacattcttagcagctgcctaatttcactccctgactctcatctccctcttccaatccttttcattgtgctagaacactatcttgctaattttaatatcctctgcattcagtgcctccacagattgccccctcactgacctttccaatttggccttgtgttacacactttcctcgctgcattcctacccagcatcttcacttgtcatatttctcaaatactcttcatgaccagatatttaaagtacctcatccatgaagacttcatcaacccccaaagtgcctccaatgcttccgtggtagcacagcataatggggtacatttcttagttgaacagtgaggagtcactgggattcttacagagtgtcttagggtctcctcttgatactctttccacatttcagttaaggaattttcttacatctttttttcttctaataacctttgcctggagtgtaagtaaattcatgatagagactgtcatttttaaaaaaaaaaacaaaccattttgcctttcacatgttattacctccatctttctgttatcttgtcagtgttgccacctaaatgattgaaaatgaccgagcatgcagtagaatgtagtgaagtttcctatttcatccattttttgcataagtgcattggtatctgtatatccatctgcccaagcaccagttgttgaaaagactattatttccccatgaatggtcctggtacccttgtcaaagaacagttgaccataaatataagactttctggattctcagtcttactccattgccctatatgtctgtcgttataccagcaccgcactgtcttgatggctgtagcttggtagtaagtttagatttgggatgtgcaagtcctccattttttttttttttttccccaaaatcattttgtctgttttgggtcccttgcattgcatatgaatttttatatgatcattgtgtcaattcctgcaaaacagctgggatcttgatagggatttagttgaattggtagataaatttgagaaataactgctattttaatggtgttaggttttctgttccatgactgtgggatgtctttgcatttgcttaggtctttatttcagtgatgttttagagatttcagtgtgcaagtcttgacgtctttaatttttttctaagtattttactgatgccactttaattatatgattattttctaatttttatttttgtattcatcactggtgttagaaataaaattaatttttgtatattgattttgtatattgtagcttttctaaaattctttttttgtcacttagtattttttgcatatgagatcatgcatctgtgaacagaaatacttttacttcttcctttccagtctagattcctattatttcattttcttgccttagtgtgctggctagcacctccagtacaatattggatagaagtgacaagagcagacatctttttcttgttcctgattttaaggggaaagcattcagtctttcaccattgagtatgatgttagctagctgtgggtttgcttcaagttgaggaaattcttttattaaacctagtttactgagtgttttttaatcaaaaaaaaaaaaaggaggggctgtgggttttgttaaatgcttcttctgtatcaagattttcatgttgttttgtcctttattaatatgttgtattaatggacttttgtatattgaattaactttgcattcctgggataatctcagttgtccatgctacataaaccttgttctatgctgctgga

SEQ ID NO: 668 - DNA, 8493 bp, Homo sapiens
  source 1..8493: mol_type = genomic DNA
agactgccatactgttttccacagtgactgcaccattttacattcccaccagcagtgaataagggttccaatttctctgcatcttttctaacacttgaggggaggtatggtgtcaagaaaacatagtcaccattattacgaaaagtaaaatatggaagagatgatccctaccatcaatcagcttacaactagaggcactgacaaatgtatacagatagctgtaatgtaaggttaaaaatctgtaagagcctgattttagaattcaccagctcctcagaagtttggcgaaatatgagttattaagcctacgctcagatcaaggtagcagctagactggtgtgacaacctgtttttaatcagtgactcaaagctgtgatcaccctgatgtcaccgaatggccacagcttgtaaaagctcttctgtctgggagatacaagtttggaagcaatcttggggtacttacccacaaggctggtggagaccagatcaggagaacctcagtctgacgacattgaagctagccgaatgaagcgagcagctgcaaagcatctaatagaacgctactaccaccagttaactgagggctgtggaaatgaagcctgcacgaatgagttttgtgcttcctgtccaacttttcttcgtatggataataatgcagcagctattaaagccctcgagctttataagattaatgcaaaactctgtgatcctcatccctccaagaaaggagcaagctcagcttaccttgagaactcgaaaggtgcccccaacaactcctgctctgagataaaaatgaacaagaaaggcgctagaattgattttaaagatgtgacttacttaacagaagagaaggtatatgaaattcttgaattatgtagagaaagagaggattattcccctttaatccgtgttattggaagagttttttctagtgctgaggcattggtacagagcttccggaaagttaaacaacacaccaaggaagaactgaaatctcttcaagcaaaagatgaagacaaagatgaagatgaaaaggaaaaagctgcatgttctgctgctgctatggaagaagactcagaagcatcttcctcaaggataggtgatagctcacagggagacaacaatttgcaaaaattaggccctgatgatgtgtctgtggatattgatgccattagaagggtctacaccagattgctctctaatgaaaaaattgaaactgcctttctcaatgcacttgtatatttgtcacctaacgtggaatgtgacttgacgtatcacaatgtatactctcgagatcctaattatctgaatttgttcattatcgtaatggagaatagaaatctccacagtcctgaatatctggaaatggctttgccattattttgcaaagcgatgagcaagctaccccttgcagcccaaggaaaactgatcagactgtggtctaaatacaatgcagaccagattcggagaatgatggagacatttcagcaacttattacttataaagtcataagcaatgaatttaacagtcgaaatctagtgaatgatgatgatgccattgttgctgcttcgaagtgcttgaaaatggtttactatgcaaatgtagtgggaggggaagtggacacaaatcacaatgaagaagatgatgaagagcccatccctgagtccagcgagctgacacttcaggaacttttgggagaagaaagaagaaacaagaaaggtcctcgagtggaccccctggaaactgaacttggtgttaaaaccctggattgtcgaaaaccacttatcccttttgaagagtttattaatgaaccactgaatgaggttctagaaatggataaagattatacttttttcaaagtagaaacagagaacaaattctcttttatgacatgtccctttatattgaatgctgtcacaaagaatttgggattatattatgacaatagaattcgcatgtacagtgaacgaagaatcactgttctctacagcttagttcaaggacagcagttgaatccatatttgagactcaaagttagacgtgaccatatcatagatgatgcacttgtccggctagagatgatcgctatggaaaatcctgcagacttgaagaagcagttgtatgtggaatttgaaggagaacaaggagttgatgagggaggtgtttccaaagaattttttcagctggttgtggaggaaatcttcaatccagatattggtatgttcacatacgatgaatctacaaaattgttttggtttaatccatcttcttttgaaactgagggtcagtttactctgattggcatagtactgggtctggctatttacaataactgtatactggatgtacattttcccatggttgtctacaggaagctaatggggaaaaaaggaacttttcgtgacttgggagactctcacccagttctatatcagagtttaaaagatttattggagtatgaagggaatgtggaagatgacatgatgatcactttccagatatcacagacagatctttttggtaacccaatgatgtatgatctaaaggaaaatggtgataaaattccaattacaaatgaaaacaggaaggaatttgtcaatctttattctgactacattctcaataaatcagtagaaaaacagttcaaggcttttcggagaggttttcatatggtgaccaatgaatctcccttaaagtacttattcagaccagaagaaattgaattgcttatatgtggaagccggaatctagatttccaagcactagaagaaactacagaatatgacggtggctataccagggactctgttctgattagggagttctgggaaatcgttcattcatttacagatgaacagaaaagactcttcttgcagtttacaacgggcacagacagagcacctgtgggaggactaggaaaattaaagatgattatagccaaaaatggcccagacacagaaaggttacctacatctcatacttgctttaatgtgcttttacttccggaatactcaagcaaagaaaaacttaaagagagattgttgaaggccatcacgtatgccaaaggatttggcatgctgtaaaacaaaacaaaacaaaataaaacaaaaaaaaggaaggaaaaaaaaagaaaaaatttaaaaaattttaaaaatataacgagggataaatttttggtggtgatagtgtcccagtacaaaaaggctgtaagatagtcaaccacagtagtcacctatgtctgtgcctcccttctttattggggacatgtgggctggaacagcagatttcagctacatatatgaacaaatcctttattattattataattatttttttgcgtgaaagtgttacatattctttcacttgtatgtacagagaggtttttctgaatatttattttaagggttaaatcacttttgcttgtgtttattactgcttgaggttgagccttttgagtatttaaaaaatatataccaacagaactactctcccaaggaaaatattgccaccatttgtagaccacgtaaccttcaagtatgtgctacttttttgtccctgtatctaactcaaatcaggaactgtattttttttaatgatttgcttttgaaacttgaagtcttgaaaacagtgtgatgcaattactgctgttctagcccccaaagagttttctgtgcaaaatcttgagaatcaatcaataaagaaagatggaaggaagggagaaattggaatgttttaactgcagccctcagaactttagtaacagcacaacaaattaaaaacaaaaacaactcatgccacagtatgtcgtcttcatgtgtcttgcaatgaactgtttcagtagccaatcctctttcttagtatatgaaaggacagggatttttgttcttgttgttctcgttgttgttttaagtttactggggaaagtgcatttggccaaatgaaatggtagtcaagcctattgcaacaaagttaggaagtttgttgtttgtttattataaacaaaaagcatgtgaaagtgcacttaagatagagtttttattaattacttacttattacctagattttaaatagacaatccaaagtctccccttcgtgttgccatcatcttgttgaatcagccattttatcgaggcacgtgatcagtgttgcaacataatgaaaaagatggctactgtgccttgtgttacttaatcatacagtaagctgacctggaaatgaatgaaactattactcctaagaattacattgtatagccccacagattaaatttaattaattaattcaaaacatgttaaacgttactttcatgtactatggaaaagtacaagtaggtttacattactgatttccagaagtaagtagtttcccctttcctagtcttctgtgtatgtgatgttgttaatttcttttattgcattataaaataaaaggattatgtatttttaactaaggtgagacattgatatatccttttgctacaagctatagctaatgtgctgagcttgtgccttggtgattgattgattgattgactgattgttttaactgattactgtagatcaacctgatgatttgtttgtttgaaattggcaggaaaaatgcagctttcaaatcattggggggagaaaaaggatgtctttcaggattattttaattaatttttttcataattgagacagaactgtttgttatgtaccataatgctaaataaaactgtggcacttttcaccataatttaatttagtggaaaaagaagacaatgctttccatattgtgataaggtaacatggggtttttctgggccagcctttagaacactgttagggtacatacgctaccttgatgaaagggaccttcgtgcaactgtagtcatcttaaaggcttctcatccactgtgcttcttaatgtgtaattaaagtgaggagaaattaaatactctgagggcgttttatataataaattcgtgaagaaatgtgtgctcttcagttctcaagttttattattatggtatttattaaagttctacaattgtaataacgtatccatatgacaagttttaaagtggtaattgaaataggttatcagatatagagttgttcacatcaagtagacttttaacagagtcagaatgaacctacccttaaaattttagagaaaaaaaatcgtcggttgcacagaatagctgctctagcttgcttaattatgccgggcatgttgtcactcctcttacttttgctgccttttcattactatttaatggaatgtccctgaacaataaggaagagcaaaacatagacattttgactacagtggatacttcctctaccccaaatgttatgttataaaagtactttttttgcccaggtactctattatatattttggttttctttgaattagacctcaatctccaggaagctctggagggaaaaaaaggaaccataaactaaagtaactggttttccaaataaatgtaaacttttttaaccttttattattatagaacatttcaaacatacataaaacatgaaaacagcctgcagccaaacttttctggaccttggcagctccagcaaatgagctggtcatcctaaccctggtttcctgagacaactacttttggggatgcttgcttgtatagggagatgatagatagatagatacatatcaaaaagaaacttgaaaaaggcttcgaacagaacttgccgatgttactcatccctcctcggtacagacattctgttagaacagatggttgtaatggggcagcatcactccctattcccattaaaaacatgaccattctgagatttcaggccccttcgaggaatttttctcaagaattccatacaaactgtcagaggaagaaatgtcgtcccaagactagtccctgtgtagtcttgatccctttacctgcttactgtaattttttttctctgactttccgccagtgtctaagggccatctgtacccctcccacccttccatgagccactgtataatccaaaaacacaccttccatttgctccctcacttgtctccttttacctcaacagtgttagtgtgtaaagaattgcctggggagggtagagggttttacaagtacagagtcccaagtcttttctcccctccccgttagtgggttggcatttattaataggcactgcaagattttgatgcaggtgtggggtagatatcactgtgaaaggctactaatgcatggtagtttcaccgaaagtacagtcttcaaggatccttataatctcctcattgccaaaatcagtaacatctataaccttgacaacaccctagcttgggctgttgcttctctggctacttgtttttccatcccagtttacccagattttagatggatactcctccaattctgcttaaagtccttacctgttcttgcccagttccctctagtcaacctcagtcactcccaaagattcttccccaatcccatatcttttgctcagacctctgtctctgggatttctttgttacctcatagtcagtagtcctaaaaacaaaattcttcatcttgcatctctatcgaccgaccattctttgtttctttttaagaaatgtaaccttcaccccaatcatcaaaatctctcattcctcaattgtcacaggttgtcacttctttccccctaaacctctcccatcattccttccttctttatactgcccttacaggtcctgatcctctgactcacccggacattcttagcagctgcctaatttcactccctgactctcatctccctcttccaatccttttcattgtgctagaacactatcttgctaattttaatatcctctgcattcagtgcctccacagattgccccctcactgacctttccaatttggccttgtgttacacactttcctcgctgcattcctacccagcatcttcacttgtcatatttctcaaatactcttcatgaccagatatttaaagtacctcatccatgaagacttcatcaacccccaaagtgcctccaatgcttccgtggtagcacagcataatggggtacatttcttagttgaacagtgaggagtcactgggattcttacagagtgtcttagggtctcctcttgatactctttccacatttcagttaaggaattttcttacatctttttttcttctaataacctttgcctggagtgtaagtaaattcatgatagagactgtcatttttaaaaaaaaaaacaaaccattttgcctttcacatgttattacctccatctttctgttatcttgtcagtgttgccacctaaatgattgaaaatgaccgagcatgcagtagaatgtagtgaagtttcctatttcatccattttttgcataagtgcattggtatctgtatatccatctgcccaagcaccagttgttgaaaagactattatttccccatgaatggtcctggtacccttgtcaaagaacagttgaccataaatataagactttctggattctcagtcttactccattgccctatatgtctgtcgttataccagcaccgcactgtcttgatggctgtagcttggtagtaagtttagatttgggatgtgcaagtcctccattttttttttttttttccccaaaatcattttgtctgttttgggtcccttgcattgcatatgaatttttatatgatcattgtgtcaattcctgcaaaacagctgggatcttgatagggatttagttgaattggtagataaatttgagaaataactgctattttaatggtgttaggttttctgttccatgactgtgggatgtctttgcatttgcttaggtctttatttcagtgatgttttagagatttcagtgtgcaagtcttgacgtctttaatttttttctaagtattttactgatgccactttaattatatgattattttctaatttttatttttgtattcatcactggtgttagaaataaaattaatttttgtatattgattttgtatattgtagcttttctaaaattctttttttgtcacttagtattttttgcatatgagatcatgcatctgtgaacagaaatacttttacttcttcctttccagtctagattcctattatttcattttcttgccttagtgtgctggctagcacctccagtacaatattggatagaagtgacaagagcagacatctttttcttgttcctgattttaaggggaaagcattcagtctttcaccattgagtatgatgttagctagctgtgggtttgcttcaagttgaggaaattcttttattaaacctagtttactgagtgttttttaatcaaaaaaaaaaaaaggaggggctgtgggttttgttaaatgcttcttctgtatcaagattttcatgttgttttgtcctttattaatatgttgtattaatggacttttgtatattgaattaactttgcattcctgggataatctcagttgtccatgctacataaaccttgttctatgctgctgga

SEQ ID NO: 669 - DNA, 8331 bp, Homo sapiens
  source 1..8331: mol_type = genomic DNA
agactgccatactgttttccacagtgactgcaccattttacattcccaccagcagtgaataagggttccaatttctctgcatcttttctaacacttgaggggaggtatggtgtcaagaaaacatagtcaccattattacgaaaagtaaaatatggaagagatgatccctaccatcaatcagcttacaactagaggcactgacaaatgtatacagatagctgtaatgtaaggttaaaaatctgtaagagcctgattttagaattcaccagctcctcagaagtttggcgaaatatgagttattaagcctacgctcagatcaaggtagcagctagactggtgtgacaacctgtttttaatcagtgactcaaagctgtgatcaccctgatgtcaccgaatggccacagcttgtaaaagagagttacagtggaggtaaaaggagtggcttgcaggatggagaagctgcaccagtgttattggaaatcaggagaacctcagtctgacgacattgaagctagccgaatgaagcgagcagctgcaaagcatctaatagaacgctactaccaccagttaactgagggctgtggaaatgaagcctgcacgaatgagttttgtgcttcctgtccaacttttcttcgtatggataataatgcagcagctattaaagccctcgagctttataagattaatgcaaaactctgtgatcctcatccctccaagaaaggagcaagctcagcttaccttgagaactcgaaaggtgcccccaacaactcctgctctgagataaaaatgaacaagaaaggcgctagaattgattttaaagatgtgacttacttaacagaagagaaggtatatgaaattcttgaattatgtagagaaagagaggattattcccctttaatccgtgttattggaagagttttttctagtgctgaggcattggtacagagcttccggaaagttaaacaacacaccaaggaagaactgaaatctcttcaagcaaaagatgaagacaaagatgaagatgaaaaggaaaaagctgcatgttctgctgctgctatggaagaagactcagaagcatcttcctcaaggataggtgatagctcacagggagacaacaatttgcaaaaattaggccctgatgatgtgtctgtggatattgatgccattagaagggtctacaccagattgctctctaatgaaaaaattgaaactgcctttctcaatgcacttgtatatttgtcacctaacgtggaatgtgacttgacgtatcacaatgtatactctcgagatcctaattatctgaatttgttcattatcgtaatggagaatagaaatctccacagtcctgaatatctggaaatggctttgccattattttgcaaagcgatgagcaagctaccccttgcagcccaaggaaaactgatcagactgtggtctaaatacaatgcagaccagattcggagaatgatggagacatttcagcaacttattacttataaagtcataagcaatgaatttaacagtcgaaatctagtgaatgatgatgatgccattgttgctgcttcgaagtgcttgaaaatggtttactatgcaaatgtagtgggaggggaagtggacacaaatcacaatgaagaagatgatgaagagcccatccctgagtccagcgagctgacacttcaggaacttttgggagaagaaagaagaaacaagaaaggtcctcgagtggaccccctggaaactgaacttggtgttaaaaccctggattgtcgaaaaccacttatcccttttgaagagtttattaatgaaccactgaatgaggttctagaaatggataaagattatacttttttcaaagtagaaacagagaacaaattctcttttatgacatgtccctttatattgaatgctgtcacaaagaatttgggattatattatgacaatagaattcgcatgtacagtgaacgaagaatcactgttctctacagcttagttcaaggacagcagttgaatccatatttgagactcaaagttagacgtgaccatatcatagatgatgcacttgtccggctagagatgatcgctatggaaaatcctgcagacttgaagaagcagttgtatgtggaatttgaaggagaacaaggagttgatgagggaggtgtttccaaagaattttttcagctggttgtggaggaaatcttcaatccagatattggtatgttcacatacgatgaatctacaaaattgttttggtttaatccatcttcttttgaaactgagggtcagtttactctgattggcatagtactgggtctggctatttacaataactgtatactggatgtacattttcccatggttgtctacaggaagctaatggggaaaaaaggaacttttcgtgacttgggagactctcacccagttctatatcagagtttaaaagatttattggagtatgaagggaatgtggaagatgacatgatgatcactttccagatatcacagacagatctttttggtaacccaatgatgtatgatctaaaggaaaatggtgataaaattccaattacaaatgaaaacaggaagaatctagatttccaagcactagaagaaactacagaatatgacggtggctataccagggactctgttctgattagggagttctgggaaatcgttcattcatttacagatgaacagaaaagactcttcttgcagtttacaacgggcacagacagagcacctgtgggaggactaggaaaattaaagatgattatagccaaaaatggcccagacacagaaaggttacctacatctcatacttgctttaatgtgcttttacttccggaatactcaagcaaagaaaaacttaaagagagattgttgaaggccatcacgtatgccaaaggatttggcatgctgtaaaacaaaacaaaacaaaataaaacaaaaaaaaggaaggaaaaaaaaagaaaaaatttaaaaaattttaaaaatataacgagggataaatttttggtggtgatagtgtcccagtacaaaaaggctgtaagatagtcaaccacagtagtcacctatgtctgtgcctcccttctttattggggacatgtgggctggaacagcagatttcagctacatatatgaacaaatcctttattattattataattatttttttgcgtgaaagtgttacatattctttcacttgtatgtacagagaggtttttctgaatatttattttaagggttaaatcacttttgcttgtgtttattactgcttgaggttgagccttttgagtatttaaaaaatatataccaacagaactactctcccaaggaaaatattgccaccatttgtagaccacgtaaccttcaagtatgtgctacttttttgtccctgtatctaactcaaatcaggaactgtattttttttaatgatttgcttttgaaacttgaagtcttgaaaacagtgtgatgcaattactgctgttctagcccccaaagagttttctgtgcaaaatcttgagaatcaatcaataaagaaagatggaaggaagggagaaattggaatgttttaactgcagccctcagaactttagtaacagcacaacaaattaaaaacaaaaacaactcatgccacagtatgtcgtcttcatgtgtcttgcaatgaactgtttcagtagccaatcctctttcttagtatatgaaaggacagggatttttgttcttgttgttctcgttgttgttttaagtttactggggaaagtgcatttggccaaatgaaatggtagtcaagcctattgcaacaaagttaggaagtttgttgtttgtttattataaacaaaaagcatgtgaaagtgcacttaagatagagtttttattaattacttacttattacctagattttaaatagacaatccaaagtctccccttcgtgttgccatcatcttgttgaatcagccattttatcgaggcacgtgatcagtgttgcaacataatgaaaaagatggctactgtgccttgtgttacttaatcatacagtaagctgacctggaaatgaatgaaactattactcctaagaattacattgtatagccccacagattaaatttaattaattaattcaaaacatgttaaacgttactttcatgtactatggaaaagtacaagtaggtttacattactgatttccagaagtaagtagtttcccctttcctagtcttctgtgtatgtgatgttgttaatttcttttattgcattataaaataaaaggattatgtatttttaactaaggtgagacattgatatatccttttgctacaagctatagctaatgtgctgagcttgtgccttggtgattgattgattgattgactgattgttttaactgattactgtagatcaacctgatgatttgtttgtttgaaattggcaggaaaaatgcagctttcaaatcattggggggagaaaaaggatgtctttcaggattattttaattaatttttttcataattgagacagaactgtttgttatgtaccataatgctaaataaaactgtggcacttttcaccataatttaatttagtggaaaaagaagacaatgctttccatattgtgataaggtaacatggggtttttctgggccagcctttagaacactgttagggtacatacgctaccttgatgaaagggaccttcgtgcaactgtagtcatcttaaaggcttctcatccactgtgcttcttaatgtgtaattaaagtgaggagaaattaaatactctgagggcgttttatataataaattcgtgaagaaatgtgtgctcttcagttctcaagttttattattatggtatttattaaagttctacaattgtaataacgtatccatatgacaagttttaaagtggtaattgaaataggttatcagatatagagttgttcacatcaagtagacttttaacagagtcagaatgaacctacccttaaaattttagagaaaaaaaatcgtcggttgcacagaatagctgctctagcttgcttaattatgccgggcatgttgtcactcctcttacttttgctgccttttcattactatttaatggaatgtccctgaacaataaggaagagcaaaacatagacattttgactacagtggatacttcctctaccccaaatgttatgttataaaagtactttttttgcccaggtactctattatatattttggttttctttgaattagacctcaatctccaggaagctctggagggaaaaaaaggaaccataaactaaagtaactggttttccaaataaatgtaaacttttttaaccttttattattatagaacatttcaaacatacataaaacatgaaaacagcctgcagccaaacttttctggaccttggcagctccagcaaatgagctggtcatcctaaccctggtttcctgagacaactacttttggggatgcttgcttgtatagggagatgatagatagatagatacatatcaaaaagaaacttgaaaaaggcttcgaacagaacttgccgatgttactcatccctcctcggtacagacattctgttagaacagatggttgtaatggggcagcatcactccctattcccattaaaaacatgaccattctgagatttcaggccccttcgaggaatttttctcaagaattccatacaaactgtcagaggaagaaatgtcgtcccaagactagtccctgtgtagtcttgatccctttacctgcttactgtaattttttttctctgactttccgccagtgtctaagggccatctgtacccctcccacccttccatgagccactgtataatccaaaaacacaccttccatttgctccctcacttgtctccttttacctcaacagtgttagtgtgtaaagaattgcctggggagggtagagggttttacaagtacagagtcccaagtcttttctcccctccccgttagtgggttggcatttattaataggcactgcaagattttgatgcaggtgtggggtagatatcactgtgaaaggctactaatgcatggtagtttcaccgaaagtacagtcttcaaggatccttataatctcctcattgccaaaatcagtaacatctataaccttgacaacaccctagcttgggctgttgcttctctggctacttgtttttccatcccagtttacccagattttagatggatactcctccaattctgcttaaagtccttacctgttcttgcccagttccctctagtcaacctcagtcactcccaaagattcttccccaatcccatatcttttgctcagacctctgtctctgggatttctttgttacctcatagtcagtagtcctaaaaacaaaattcttcatcttgcatctctatcgaccgaccattctttgtttctttttaagaaatgtaaccttcaccccaatcatcaaaatctctcattcctcaattgtcacaggttgtcacttctttccccctaaacctctcccatcattccttccttctttatactgcccttacaggtcctgatcctctgactcacccggacattcttagcagctgcctaatttcactccctgactctcatctccctcttccaatccttttcattgtgctagaacactatcttgctaattttaatatcctctgcattcagtgcctccacagattgccccctcactgacctttccaatttggccttgtgttacacactttcctcgctgcattcctacccagcatcttcacttgtcatatttctcaaatactcttcatgaccagatatttaaagtacctcatccatgaagacttcatcaacccccaaagtgcctccaatgcttccgtggtagcacagcataatggggtacatttcttagttgaacagtgaggagtcactgggattcttacagagtgtcttagggtctcctcttgatactctttccacatttcagttaaggaattttcttacatctttttttcttctaataacctttgcctggagtgtaagtaaattcatgatagagactgtcatttttaaaaaaaaaaacaaaccattttgcctttcacatgttattacctccatctttctgttatcttgtcagtgttgccacctaaatgattgaaaatgaccgagcatgcagtagaatgtagtgaagtttcctatttcatccattttttgcataagtgcattggtatctgtatatccatctgcccaagcaccagttgttgaaaagactattatttccccatgaatggtcctggtacccttgtcaaagaacagttgaccataaatataagactttctggattctcagtcttactccattgccctatatgtctgtcgttataccagcaccgcactgtcttgatggctgtagcttggtagtaagtttagatttgggatgtgcaagtcctccattttttttttttttttccccaaaatcattttgtctgttttgggtcccttgcattgcatatgaatttttatatgatcattgtgtcaattcctgcaaaacagctgggatcttgatagggatttagttgaattggtagataaatttgagaaataactgctattttaatggtgttaggttttctgttccatgactgtgggatgtctttgcatttgcttaggtctttatttcagtgatgttttagagatttcagtgtgcaagtcttgacgtctttaatttttttctaagtattttactgatgccactttaattatatgattattttctaatttttatttttgtattcatcactggtgttagaaataaaattaatttttgtatattgattttgtatattgtagcttttctaaaattctttttttgtcacttagtattttttgcatatgagatcatgcatctgtgaacagaaatacttttacttcttcctttccagtctagattcctattatttcattttcttgccttagtgtgctggctagcacctccagtacaatattggatagaagtgacaagagcagacatctttttcttgttcctgattttaaggggaaagcattcagtctttcaccattgagtatgatgttagctagctgtgggtttgcttcaagttgaggaaattcttttattaaacctagtttactgagtgttttttaatcaaaaaaaaaaaaaggaggggctgtgggttttgttaaatgcttcttctgtatcaagattttcatgttgttttgtcctttattaatatgttgtattaatggacttttgtatattgaattaactttgcattcctgggataatctcagttgtccatgctacataaaccttgttctatgctgctgga

SEQ ID NO: 670 - DNA, 8487 bp, Homo sapiens
  source 1..8487: mol_type = genomic DNA
agactgccatactgttttccacagtgactgcaccattttacattcccaccagcagtgaataagggttccaatttctctgcatcttttctaacacttgaggggaggtatggtgtcaagaaaacatagtcaccattattacgaaaagtaaaatatggaagagatgatccctaccatcaatcagcttacaactagaggcactgacaaatgtatacagatagctgtaatgtaaggttaaaaatctgtaagagcctgattttagaattcaccagctcctcagaagtttggcgaaatatgagttattaagcctacgctcagatcaaggtagcagctagactggtgtgacaacctgtttttaatcagtgactcaaagctgtgatcaccctgatgtcaccgaatggccacagcttgtaaaagagagttacagtggaggtaaaaggagtggcttgcaggatggagaagctgcaccagtgttattggaaatcaggagaacctcagtctgacgacattgaagctagccgaatgaagcgagcagctgcaaagcatctaatagaacgctactaccaccagttaactgagggctgtggaaatgaagcctgcacgaatgagttttgtgcttcctgtccaacttttcttcgtatggataataatgcagcagctattaaagccctcgagctttataagattaatgcaaaactctgtgatcctcatccctccaagaaaggagcaagctcagcttaccttgagaactcgaaaggtgcccccaacaactcctgctctgagataaaaatgaacaagaaaggcgctagaattgattttaaagatgtgacttacttaacagaagagaaggtatatgaaattcttgaattatgtagagaaagagaggattattcccctttaatccgtgttattggaagagttttttctagtgctgaggcattggtacagagcttccggaaagttaaacaacacaccaaggaagaactgaaatctcttcaagcaaaagatgaagacaaagatgaagatgaaaaggaaaaagctgcatgttctgctgctgctatggaagaagactcagaagcatcttcctcaaggataggtgatagctcacagggagacaacaatttgcaaaaattaggccctgatgatgtgtctgtggatattgatgccattagaagggtctacaccagattgctctctaatgaaaaaattgaaactgcctttctcaatgcacttgtatatttgtcacctaacgtggaatgtgacttgacgtatcacaatgtatactctcgagatcctaattatctgaatttgttcattatcgtaatggagaatagaaatctccacagtcctgaatatctggaaatggctttgccattattttgcaaagcgatgagcaagctaccccttgcagcccaaggaaaactgatcagactgtggtctaaatacaatgcagaccagattcggagaatgatggagacatttcagcaacttattacttataaagtcataagcaatgaatttaacagtcgaaatctagtgaatgatgatgatgccattgttgctgcttcgaagtgcttgaaaatggtttactatgcaaatgtagtgggaggggaagtggacacaaatcacaatgaagaagatgatgaagagcccatccctgagtccagcgagctgacacttcaggaacttttgggagaagaaagaagaaacaagaaaggtcctcgagtggaccccctggaaactgaacttggtgttaaaaccctggattgtcgaaaaccacttatcccttttgaagagtttattaatgaaccactgaatgaggttctagaaatggataaagattatacttttttcaaagtagaaacagagaacaaattctcttttatgacatgtccctttatattgaatgctgtcacaaagaatttgggattatattatgacaatagaattcgcatgtacagtgaacgaagaatcactgttctctacagcttagttcaaggacagcagttgaatccatatttgagactcaaagttagacgtgaccatatcatagatgatgcacttgtccggctagagatgatcgctatggaaaatcctgcagacttgaagaagcagttgtatgtggaatttgaaggagaacaaggagttgatgagggaggtgtttccaaagaattttttcagctggttgtggaggaaatcttcaatccagatattggtatgttcacatacgatgaatctacaaaattgttttggtttaatccatcttcttttgaaactgagggtcagtttactctgattggcatagtactgggtctggctatttacaataactgtatactggatgtacattttcccatggttgtctacaggaagctaatggggaaaaaaggaacttttcgtgacttgggagactctcacccagttctatatcagagtttaaaagatttattggagtatgaagggaatgtggaagatgacatgatgatcactttccagatatcacagacagatctttttggtaacccaatgatgtatgatctaaaggaaaatggtgataaaattccaattacaaatgaaaacaggaaggaatttgtcaatctttattctgactacattctcaataaatcagtagaaaaacagttcaaggcttttcggagaggttttcatatggtgaccaatgaatctcccttaaagtacttattcagaccagaagaaattgaattgcttatatgtggaagccggaatctagatttccaagcactagaagaaactacagaatatgacggtggctataccagggactctgttctgattagggagttctgggaaatcgttcattcatttacagatgaacagaaaagactcttcttgcagtttacaacgggcacagacagagcacctgtgggaggactaggaaaattaaagatgattatagccaaaaatggcccagacacagaaaggttacctacatctcatacttgctttaatgtgcttttacttccggaatactcaagcaaagaaaaacttaaagagagattgttgaaggccatcacgtatgccaaaggatttggcatgctgtaaaacaaaacaaaacaaaataaaacaaaaaaaaggaaggaaaaaaaaagaaaaaatttaaaaaattttaaaaatataacgagggataaatttttggtggtgatagtgtcccagtacaaaaaggctgtaagatagtcaaccacagtagtcacctatgtctgtgcctcccttctttattggggacatgtgggctggaacagcagatttcagctacatatatgaacaaatcctttattattattataattatttttttgcgtgaaagtgttacatattctttcacttgtatgtacagagaggtttttctgaatatttattttaagggttaaatcacttttgcttgtgtttattactgcttgaggttgagccttttgagtatttaaaaaatatataccaacagaactactctcccaaggaaaatattgccaccatttgtagaccacgtaaccttcaagtatgtgctacttttttgtccctgtatctaactcaaatcaggaactgtattttttttaatgatttgcttttgaaacttgaagtcttgaaaacagtgtgatgcaattactgctgttctagcccccaaagagttttctgtgcaaaatcttgagaatcaatcaataaagaaagatggaaggaagggagaaattggaatgttttaactgcagccctcagaactttagtaacagcacaacaaattaaaaacaaaaacaactcatgccacagtatgtcgtcttcatgtgtcttgcaatgaactgtttcagtagccaatcctctttcttagtatatgaaaggacagggatttttgttcttgttgttctcgttgttgttttaagtttactggggaaagtgcatttggccaaatgaaatggtagtcaagcctattgcaacaaagttaggaagtttgttgtttgtttattataaacaaaaagcatgtgaaagtgcacttaagatagagtttttattaattacttacttattacctagattttaaatagacaatccaaagtctccccttcgtgttgccatcatcttgttgaatcagccattttatcgaggcacgtgatcagtgttgcaacataatgaaaaagatggctactgtgccttgtgttacttaatcatacagtaagctgacctggaaatgaatgaaactattactcctaagaattacattgtatagccccacagattaaatttaattaattaattcaaaacatgttaaacgttactttcatgtactatggaaaagtacaagtaggtttacattactgatttccagaagtaagtagtttcccctttcctagtcttctgtgtatgtgatgttgttaatttcttttattgcattataaaataaaaggattatgtatttttaactaaggtgagacattgatatatccttttgctacaagctatagctaatgtgctgagcttgtgccttggtgattgattgattgattgactgattgttttaactgattactgtagatcaacctgatgatttgtttgtttgaaattggcaggaaaaatgcagctttcaaatcattggggggagaaaaaggatgtctttcaggattattttaattaatttttttcataattgagacagaactgtttgttatgtaccataatgctaaataaaactgtggcacttttcaccataatttaatttagtggaaaaagaagacaatgctttccatattgtgataaggtaacatggggtttttctgggccagcctttagaacactgttagggtacatacgctaccttgatgaaagggaccttcgtgcaactgtagtcatcttaaaggcttctcatccactgtgcttcttaatgtgtaattaaagtgaggagaaattaaatactctgagggcgttttatataataaattcgtgaagaaatgtgtgctcttcagttctcaagttttattattatggtatttattaaagttctacaattgtaataacgtatccatatgacaagttttaaagtggtaattgaaataggttatcagatatagagttgttcacatcaagtagacttttaacagagtcagaatgaacctacccttaaaattttagagaaaaaaaatcgtcggttgcacagaatagctgctctagcttgcttaattatgccgggcatgttgtcactcctcttacttttgctgccttttcattactatttaatggaatgtccctgaacaataaggaagagcaaaacatagacattttgactacagtggatacttcctctaccccaaatgttatgttataaaagtactttttttgcccaggtactctattatatattttggttttctttgaattagacctcaatctccaggaagctctggagggaaaaaaaggaaccataaactaaagtaactggttttccaaataaatgtaaacttttttaaccttttattattatagaacatttcaaacatacataaaacatgaaaacagcctgcagccaaacttttctggaccttggcagctccagcaaatgagctggtcatcctaaccctggtttcctgagacaactacttttggggatgcttgcttgtatagggagatgatagatagatagatacatatcaaaaagaaacttgaaaaaggcttcgaacagaacttgccgatgttactcatccctcctcggtacagacattctgttagaacagatggttgtaatggggcagcatcactccctattcccattaaaaacatgaccattctgagatttcaggccccttcgaggaatttttctcaagaattccatacaaactgtcagaggaagaaatgtcgtcccaagactagtccctgtgtagtcttgatccctttacctgcttactgtaattttttttctctgactttccgccagtgtctaagggccatctgtacccctcccacccttccatgagccactgtataatccaaaaacacaccttccatttgctccctcacttgtctccttttacctcaacagtgttagtgtgtaaagaattgcctggggagggtagagggttttacaagtacagagtcccaagtcttttctcccctccccgttagtgggttggcatttattaataggcactgcaagattttgatgcaggtgtggggtagatatcactgtgaaaggctactaatgcatggtagtttcaccgaaagtacagtcttcaaggatccttataatctcctcattgccaaaatcagtaacatctataaccttgacaacaccctagcttgggctgttgcttctctggctacttgtttttccatcccagtttacccagattttagatggatactcctccaattctgcttaaagtccttacctgttcttgcccagttccctctagtcaacctcagtcactcccaaagattcttccccaatcccatatcttttgctcagacctctgtctctgggatttctttgttacctcatagtcagtagtcctaaaaacaaaattcttcatcttgcatctctatcgaccgaccattctttgtttctttttaagaaatgtaaccttcaccccaatcatcaaaatctctcattcctcaattgtcacaggttgtcacttctttccccctaaacctctcccatcattccttccttctttatactgcccttacaggtcctgatcctctgactcacccggacattcttagcagctgcctaatttcactccctgactctcatctccctcttccaatccttttcattgtgctagaacactatcttgctaattttaatatcctctgcattcagtgcctccacagattgccccctcactgacctttccaatttggccttgtgttacacactttcctcgctgcattcctacccagcatcttcacttgtcatatttctcaaatactcttcatgaccagatatttaaagtacctcatccatgaagacttcatcaacccccaaagtgcctccaatgcttccgtggtagcacagcataatggggtacatttcttagttgaacagtgaggagtcactgggattcttacagagtgtcttagggtctcctcttgatactctttccacatttcagttaaggaattttcttacatctttttttcttctaataacctttgcctggagtgtaagtaaattcatgatagagactgtcatttttaaaaaaaaaaacaaaccattttgcctttcacatgttattacctccatctttctgttatcttgtcagtgttgccacctaaatgattgaaaatgaccgagcatgcagtagaatgtagtgaagtttcctatttcatccattttttgcataagtgcattggtatctgtatatccatctgcccaagcaccagttgttgaaaagactattatttccccatgaatggtcctggtacccttgtcaaagaacagttgaccataaatataagactttctggattctcagtcttactccattgccctatatgtctgtcgttataccagcaccgcactgtcttgatggctgtagcttggtagtaagtttagatttgggatgtgcaagtcctccattttttttttttttttccccaaaatcattttgtctgttttgggtcccttgcattgcatatgaatttttatatgatcattgtgtcaattcctgcaaaacagctgggatcttgatagggatttagttgaattggtagataaatttgagaaataactgctattttaatggtgttaggttttctgttccatgactgtgggatgtctttgcatttgcttaggtctttatttcagtgatgttttagagatttcagtgtgcaagtcttgacgtctttaatttttttctaagtattttactgatgccactttaattatatgattattttctaatttttatttttgtattcatcactggtgttagaaataaaattaatttttgtatattgattttgtatattgtagcttttctaaaattctttttttgtcacttagtattttttgcatatgagatcatgcatctgtgaacagaaatacttttacttcttcctttccagtctagattcctattatttcattttcttgccttagtgtgctggctagcacctccagtacaatattggatagaagtgacaagagcagacatctttttcttgttcctgattttaaggggaaagcattcagtctttcaccattgagtatgatgttagctagctgtgggtttgcttcaagttgaggaaattcttttattaaacctagtttactgagtgttttttaatcaaaaaaaaaaaaaggaggggctgtgggttttgttaaatgcttcttctgtatcaagattttcatgttgttttgtcctttattaatatgttgtattaatggacttttgtatattgaattaactttgcattcctgggataatctcagttgtccatgctacataaaccttgttctatgctgctgga

SEQ ID NO: 671 - DNA, 8683 bp, Homo sapiens
  source 1..8683: mol_type = genomic DNA
agactgccatactgttttccacagtgactgcaccattttacattcccaccagcagtgaataagggttccaatttctctgcatcttttctaacacttgaggggaggtatggtgtcaagaaaacatagtcaccattattacgaaaagtaaaatatggaagagatgatccctaccatcaatcagcttacaactagaggcactgacaaatgtatacagatagctgtaatgtaaggttaaaaatctgtaagagcctgattttagaattcaccagctcctcagaagtttggcgaaatatgagttattaagcctacgctcagatcaaggtagcagctagactggtgtgacaacctgtttttaatcagtgactcaaagctgtgatcaccctgatgtcaccgaatggccacagcttgtaaaagagagttacagtggaggtaaaaggagtggcttgcaggatggagaagctgcaccagtgttattggaatgccagcaggtttattttttgttttgcaagccagctctgcctccttacagtatgacatctgatgctggagggtcgcactttcaaaaatgagtcagctggtacatggggttatcatcaatttttagctcttctgtctgggagatacaagtttggaagcaatcttggggtacttacccacaaggctggtggagaccagatcaggagaacctcagtctgacgacattgaagctagccgaatgaagcgagcagctgcaaagcatctaatagaacgctactaccaccagttaactgagggctgtggaaatgaagcctgcacgaatgagttttgtgcttcctgtccaacttttcttcgtatggataataatgcagcagctattaaagccctcgagctttataagattaatgcaaaactctgtgatcctcatccctccaagaaaggagcaagctcagcttaccttgagaactcgaaaggtgcccccaacaactcctgctctgagataaaaatgaacaagaaaggcgctagaattgattttaaagatgtgacttacttaacagaagagaaggtatatgaaattcttgaattatgtagagaaagagaggattattcccctttaatccgtgttattggaagagttttttctagtgctgaggcattggtacagagcttccggaaagttaaacaacacaccaaggaagaactgaaatctcttcaagcaaaagatgaagacaaagatgaagatgaaaaggaaaaagctgcatgttctgctgctgctatggaagaagactcagaagcatcttcctcaaggataggtgatagctcacagggagacaacaatttgcaaaaattaggccctgatgatgtgtctgtggatattgatgccattagaagggtctacaccagattgctctctaatgaaaaaattgaaactgcctttctcaatgcacttgtatatttgtcacctaacgtggaatgtgacttgacgtatcacaatgtatactctcgagatcctaattatctgaatttgttcattatcgtaatggagaatagaaatctccacagtcctgaatatctggaaatggctttgccattattttgcaaagcgatgagcaagctaccccttgcagcccaaggaaaactgatcagactgtggtctaaatacaatgcagaccagattcggagaatgatggagacatttcagcaacttattacttataaagtcataagcaatgaatttaacagtcgaaatctagtgaatgatgatgatgccattgttgctgcttcgaagtgcttgaaaatggtttactatgcaaatgtagtgggaggggaagtggacacaaatcacaatgaagaagatgatgaagagcccatccctgagtccagcgagctgacacttcaggaacttttgggagaagaaagaagaaacaagaaaggtcctcgagtggaccccctggaaactgaacttggtgttaaaaccctggattgtcgaaaaccacttatcccttttgaagagtttattaatgaaccactgaatgaggttctagaaatggataaagattatacttttttcaaagtagaaacagagaacaaattctcttttatgacatgtccctttatattgaatgctgtcacaaagaatttgggattatattatgacaatagaattcgcatgtacagtgaacgaagaatcactgttctctacagcttagttcaaggacagcagttgaatccatatttgagactcaaagttagacgtgaccatatcatagatgatgcacttgtccggctagagatgatcgctatggaaaatcctgcagacttgaagaagcagttgtatgtggaatttgaaggagaacaaggagttgatgagggaggtgtttccaaagaattttttcagctggttgtggaggaaatcttcaatccagatattggtatgttcacatacgatgaatctacaaaattgttttggtttaatccatcttcttttgaaactgagggtcagtttactctgattggcatagtactgggtctggctatttacaataactgtatactggatgtacattttcccatggttgtctacaggaagctaatggggaaaaaaggaacttttcgtgacttgggagactctcacccagttctatatcagagtttaaaagatttattggagtatgaagggaatgtggaagatgacatgatgatcactttccagatatcacagacagatctttttggtaacccaatgatgtatgatctaaaggaaaatggtgataaaattccaattacaaatgaaaacaggaaggaatttgtcaatctttattctgactacattctcaataaatcagtagaaaaacagttcaaggcttttcggagaggttttcatatggtgaccaatgaatctcccttaaagtacttattcagaccagaagaaattgaattgcttatatgtggaagccggaatctagatttccaagcactagaagaaactacagaatatgacggtggctataccagggactctgttctgattagggagttctgggaaatcgttcattcatttacagatgaacagaaaagactcttcttgcagtttacaacgggcacagacagagcacctgtgggaggactaggaaaattaaagatgattatagccaaaaatggcccagacacagaaaggttacctacatctcatacttgctttaatgtgcttttacttccggaatactcaagcaaagaaaaacttaaagagagattgttgaaggccatcacgtatgccaaaggatttggcatgctgtaaaacaaaacaaaacaaaataaaacaaaaaaaaggaaggaaaaaaaaagaaaaaatttaaaaaattttaaaaatataacgagggataaatttttggtggtgatagtgtcccagtacaaaaaggctgtaagatagtcaaccacagtagtcacctatgtctgtgcctcccttctttattggggacatgtgggctggaacagcagatttcagctacatatatgaacaaatcctttattattattataattatttttttgcgtgaaagtgttacatattctttcacttgtatgtacagagaggtttttctgaatatttattttaagggttaaatcacttttgcttgtgtttattactgcttgaggttgagccttttgagtatttaaaaaatatataccaacagaactactctcccaaggaaaatattgccaccatttgtagaccacgtaaccttcaagtatgtgctacttttttgtccctgtatctaactcaaatcaggaactgtattttttttaatgatttgcttttgaaacttgaagtcttgaaaacagtgtgatgcaattactgctgttctagcccccaaagagttttctgtgcaaaatcttgagaatcaatcaataaagaaagatggaaggaagggagaaattggaatgttttaactgcagccctcagaactttagtaacagcacaacaaattaaaaacaaaaacaactcatgccacagtatgtcgtcttcatgtgtcttgcaatgaactgtttcagtagccaatcctctttcttagtatatgaaaggacagggatttttgttcttgttgttctcgttgttgttttaagtttactggggaaagtgcatttggccaaatgaaatggtagtcaagcctattgcaacaaagttaggaagtttgttgtttgtttattataaacaaaaagcatgtgaaagtgcacttaagatagagtttttattaattacttacttattacctagattttaaatagacaatccaaagtctccccttcgtgttgccatcatcttgttgaatcagccattttatcgaggcacgtgatcagtgttgcaacataatgaaaaagatggctactgtgccttgtgttacttaatcatacagtaagctgacctggaaatgaatgaaactattactcctaagaattacattgtatagccccacagattaaatttaattaattaattcaaaacatgttaaacgttactttcatgtactatggaaaagtacaagtaggtttacattactgatttccagaagtaagtagtttcccctttcctagtcttctgtgtatgtgatgttgttaatttcttttattgcattataaaataaaaggattatgtatttttaactaaggtgagacattgatatatccttttgctacaagctatagctaatgtgctgagcttgtgccttggtgattgattgattgattgactgattgttttaactgattactgtagatcaacctgatgatttgtttgtttgaaattggcaggaaaaatgcagctttcaaatcattggggggagaaaaaggatgtctttcaggattattttaattaatttttttcataattgagacagaactgtttgttatgtaccataatgctaaataaaactgtggcacttttcaccataatttaatttagtggaaaaagaagacaatgctttccatattgtgataaggtaacatggggtttttctgggccagcctttagaacactgttagggtacatacgctaccttgatgaaagggaccttcgtgcaactgtagtcatcttaaaggcttctcatccactgtgcttcttaatgtgtaattaaagtgaggagaaattaaatactctgagggcgttttatataataaattcgtgaagaaatgtgtgctcttcagttctcaagttttattattatggtatttattaaagttctacaattgtaataacgtatccatatgacaagttttaaagtggtaattgaaataggttatcagatatagagttgttcacatcaagtagacttttaacagagtcagaatgaacctacccttaaaattttagagaaaaaaaatcgtcggttgcacagaatagctgctctagcttgcttaattatgccgggcatgttgtcactcctcttacttttgctgccttttcattactatttaatggaatgtccctgaacaataaggaagagcaaaacatagacattttgactacagtggatacttcctctaccccaaatgttatgttataaaagtactttttttgcccaggtactctattatatattttggttttctttgaattagacctcaatctccaggaagctctggagggaaaaaaaggaaccataaactaaagtaactggttttccaaataaatgtaaacttttttaaccttttattattatagaacatttcaaacatacataaaacatgaaaacagcctgcagccaaacttttctggaccttggcagctccagcaaatgagctggtcatcctaaccctggtttcctgagacaactacttttggggatgcttgcttgtatagggagatgatagatagatagatacatatcaaaaagaaacttgaaaaaggcttcgaacagaacttgccgatgttactcatccctcctcggtacagacattctgttagaacagatggttgtaatggggcagcatcactccctattcccattaaaaacatgaccattctgagatttcaggccccttcgaggaatttttctcaagaattccatacaaactgtcagaggaagaaatgtcgtcccaagactagtccctgtgtagtcttgatccctttacctgcttactgtaattttttttctctgactttccgccagtgtctaagggccatctgtacccctcccacccttccatgagccactgtataatccaaaaacacaccttccatttgctccctcacttgtctccttttacctcaacagtgttagtgtgtaaagaattgcctggggagggtagagggttttacaagtacagagtcccaagtcttttctcccctccccgttagtgggttggcatttattaataggcactgcaagattttgatgcaggtgtggggtagatatcactgtgaaaggctactaatgcatggtagtttcaccgaaagtacagtcttcaaggatccttataatctcctcattgccaaaatcagtaacatctataaccttgacaacaccctagcttgggctgttgcttctctggctacttgtttttccatcccagtttacccagattttagatggatactcctccaattctgcttaaagtccttacctgttcttgcccagttccctctagtcaacctcagtcactcccaaagattcttccccaatcccatatcttttgctcagacctctgtctctgggatttctttgttacctcatagtcagtagtcctaaaaacaaaattcttcatcttgcatctctatcgaccgaccattctttgtttctttttaagaaatgtaaccttcaccccaatcatcaaaatctctcattcctcaattgtcacaggttgtcacttctttccccctaaacctctcccatcattccttccttctttatactgcccttacaggtcctgatcctctgactcacccggacattcttagcagctgcctaatttcactccctgactctcatctccctcttccaatccttttcattgtgctagaacactatcttgctaattttaatatcctctgcattcagtgcctccacagattgccccctcactgacctttccaatttggccttgtgttacacactttcctcgctgcattcctacccagcatcttcacttgtcatatttctcaaatactcttcatgaccagatatttaaagtacctcatccatgaagacttcatcaacccccaaagtgcctccaatgcttccgtggtagcacagcataatggggtacatttcttagttgaacagtgaggagtcactgggattcttacagagtgtcttagggtctcctcttgatactctttccacatttcagttaaggaattttcttacatctttttttcttctaataacctttgcctggagtgtaagtaaattcatgatagagactgtcatttttaaaaaaaaaaacaaaccattttgcctttcacatgttattacctccatctttctgttatcttgtcagtgttgccacctaaatgattgaaaatgaccgagcatgcagtagaatgtagtgaagtttcctatttcatccattttttgcataagtgcattggtatctgtatatccatctgcccaagcaccagttgttgaaaagactattatttccccatgaatggtcctggtacccttgtcaaagaacagttgaccataaatataagactttctggattctcagtcttactccattgccctatatgtctgtcgttataccagcaccgcactgtcttgatggctgtagcttggtagtaagtttagatttgggatgtgcaagtcctccattttttttttttttttccccaaaatcattttgtctgttttgggtcccttgcattgcatatgaatttttatatgatcattgtgtcaattcctgcaaaacagctgggatcttgatagggatttagttgaattggtagataaatttgagaaataactgctattttaatggtgttaggttttctgttccatgactgtgggatgtctttgcatttgcttaggtctttatttcagtgatgttttagagatttcagtgtgcaagtcttgacgtctttaatttttttctaagtattttactgatgccactttaattatatgattattttctaatttttatttttgtattcatcactggtgttagaaataaaattaatttttgtatattgattttgtatattgtagcttttctaaaattctttttttgtcacttagtattttttgcatatgagatcatgcatctgtgaacagaaatacttttacttcttcctttccagtctagattcctattatttcattttcttgccttagtgtgctggctagcacctccagtacaatattggatagaagtgacaagagcagacatctttttcttgttcctgattttaaggggaaagcattcagtctttcaccattgagtatgatgttagctagctgtgggtttgcttcaagttgaggaaattcttttattaaacctagtttactgagtgttttttaatcaaaaaaaaaaaaaggaggggctgtgggttttgttaaatgcttcttctgtatcaagattttcatgttgttttgtcctttattaatatgttgtattaatggacttttgtatattgaattaactttgcattcctgggataatctcagttgtccatgctacataaaccttgttctatgctgctgga

SEQ ID NO: 672 - DNA, 7249 bp, Homo sapiens
  source 1..7249: mol_type = genomic DNA
agtcctcccgtcttgcgccgcggccgcgagatccgtgtgtctcccaagatggtggcgctgggctcggggtgactacaggagacgacggggccttttcccttcgccaggacccgacacaccaggcttcgctcgctcgcgcacccctccgccgcgtagccatccgccagcgcgggcgcccgccatccgccgcctacttacgcttcacctctgccgacccggcgcgctcggctgcgggcggcggcgcctccttcggctcctcctcggaatagctcgcggcctgtagcccctggcaggagggcccctcagccccccggtgtggacaggcagcggcggctggcgacgaacgccgggatttcggcggccccggcgctccctttcccggcctcgttttccggataaggaagcgcgggtcccgcatgagccccggcggtggcggcagcgaaagagaacgaggcggtggcgggcggaggcggcgggcgagggcgactacgaccagtgaggcggccgccgcagcccaggcgcgggggcgacgacaggttaaaaatctgtaagagcctgattttagaattcaccagctcctcagaagtttggcgaaatatgagttattaagcctacgctcagatcaaggtagcagctagactggtgtgacaacctgtttttaatcagtgactcaaagctgtgatcaccctgatgtcaccgaatggccacagcttgtaaaaggtaattttgaattattttacagcctttaaaaggctgtcattgtaaagtgaaatacatactgtaaaaatgaagacaatgtatagttggcaggaatactgctaagaatagtgggcctgagagttgacctacttcatttaatctccttaaaatattttagtgtctttttttctcattaaaaatatcagtagccactatcaaagacctatctgtatgtataaacaggaaagtatttctcaaaaaaacttcaaggttttaaacattttactataaacattatagaaaacattaaaaatttcttaatatgcattttaaagtatgccttttatgtggtgaacgttttaactaaacatttctctagaagtttttataacattaataaaactagtatacttttctctcctagagagttacagtggaggtaaaaggagtggcttgcaggatggagaagctgcaccagtgttattggaagtgagccaccatttgaatttgctagctcatgctgcagtattcagattagtgggtgttttgtgatcatattttctgcgattcaaatcaagacctaaaattgattctcattctgagatttacattttattatccaatgttatttggttattgtttcagttttaaaatttctgacttgttattctgacacactttaggataacctaagtcaatagtttaatacaaaaatttccctttggttatatgttttgaattaggttatatgttctgcatttacaagcacatacaggattcttacttccagcaacttggcagtaaaagaataagtagactctttaggagccaaagtcaagcttgggaactgttgctaggtggtatatatttcatagtttatgtttgtttccaagacaaggtctcactccatcgcccaggctggagtgcagtggcacgatcacagttcactgcaactttgaccttctgggctcaagtgaccctcccacctcagcctcccaagttgctgggactaaaggcacccaccaccacacccggctaagagacgaggtttcatcatgttgcccaggttgaccttgaactcctgagctcaagtggtccttatgtcttgacctcccaaagtgctgagattacagacatgaactaccacacctggcatatgtcatagttttgagagtttgaattctaacctcgggactttggtaacttatttataatattctagaaatatactgttattaggatgagtagaaattcattcagacagaaactattataaattactgcaagaaaaatgtctgctagttctgcatatattcatttttctcttgattaaaaaacaatttccaatttgagtagaacaactttgctatgtttaatagacccaggacagatttattttaaggtaataatctttcaatccttcttcttctatactggattggtttaaattacttagcttgtcttatcaatggtttttaatagcctactttaatatatgtaaaaagtagtaattaatatgttacagtttggtggcaaacattttgatgccaaagttcacatattctcttgcttagggaacagaaattgggaagatagatgtagttatcatttgataatgtatttaaactctatcccatttcaggatctcaaaactttgtaacagttacatattgtacttctaagacttagatttgtttttcttcttgtgtcttacctttttgcagtaatatttttattttcctatcatcatgtcctcattttttccctctcttctctttccctgttaattttgaaagttttgctgcctacgtgtttgaaaacttctaatctgcctctcttccctcagtgccagcaggtttattttttgttttgcaagccagctctgcctccttacagtatgacatctgatgctggagggtcgcactttcaaaaatgagtcagctggtacatggggttatcatcaatttttagctcttctgtctgggagatacaagtttggaagcaatcttggggtacttacccacaaggctggtggagaccagatcaggagaacctcagtctgacgacattgaagctagccgaatgaagcgagcagctgcaaagcatctaatagaacgctactaccaccagttaactgagggctgtggaaatgaagcctgcacgaatgagttttgtgcttcctgtccaacttttcttcgtatggataataatgcagcagctattaaagccctcgagctttataagattaatgcaaaactctgtgatcctcatccctccaagaaaggagcaagctcagcttaccttgagaactcgaaaggtgcccccaacaactcctgctctgagataaaaatgaacaagaaaggcgctagaattgattttaaagatgtgacttacttaacagaagagaaggtatatgaaattcttgaattatgtagagaaagagaggattattcccctttaatccgtgttattggaagagttttttctagtgctgaggcattggtacagagcttccggaaagttaaacaacacaccaaggaagaactgaaatctcttcaagcaaaagatgaagacaaagatgaagatgaaaaggaaaaagctgcatgttctgctgctgctatggaagaagactcagaagcatcttcctcaaggataggtgatagctcacagggagacaacaatttgcaaaaattaggccctgatgatgtgtctgtggatattgatgccattagaagggtctacaccagattgctctctaatgaaaaaattgaaactgcctttctcaatgcacttgtatatttgtcacctaacgtggaatgtgacttgacgtatcacaatgtatactctcgagatcctaattatctgaatttgttcattatcgtaatggagaatagaaatctccacagtcctgaatatctggaaatggctttgccattattttgcaaagcgatgagcaagctaccccttgcagcccaaggaaaactgatcagactgtggtctaaatacaatgcagaccagattcggagaatgatggagacatttcagcaacttattacttataaagtcataagcaatgaatttaacagtcgaaatctagtgaatgatgatgatgccattgttgctgcttcgaagtgcttgaaaatggtttactatgcaaatgtagtgggaggggaagtggacacaaatcacaatgaagaagatgatgaagagcccatccctgagtccagcgagctgacacttcaggaacttttgggagaagaaagaagaaacaagaaaggtcctcgagtggaccccctggaaactgaacttggtgttaaaaccctggattgtcgaaaaccacttatcccttttgaagagtttattaatgaaccactgaatgaggttctagaaatggataaagattatacttttttcaaagtagaaacagagaacaaattctcttttatgacatgtccctttatattgaatgctgtcacaaagaatttgggattatattatgacaatagaattcgcatgtacagtgaacgaagaatcactgttctctacagcttagttcaaggacagcagttgaatccatatttgagactcaaagttagacgtgaccatatcatagatgatgcacttgtccggctagagatgatcgctatggaaaatcctgcagacttgaagaagcagttgtatgtggaatttgaaggagaacaaggagttgatgagggaggtgtttccaaagaattttttcagctggttgtggaggaaatcttcaatccagatattggtatgttcacatacgatgaatctacaaaattgttttggtttaatccatcttcttttgaaactgagggtcagtttactctgattggcatagtactgggtctggctatttacaataactgtatactggatgtacattttcccatggttgtctacaggaagctaatggggaaaaaaggaacttttcgtgacttgggagactctcacccagttctatatcagagtttaaaagatttattggagtatgaagggaatgtggaagatgacatgatgatcactttccagatatcacagacagatctttttggtaacccaatgatgtatgatctaaaggaaaatggtgataaaattccaattacaaatgaaaacaggaaggaatttgtcaatctttattctgactacattctcaataaatcagtagaaaaacagttcaaggcttttcggagaggttttcatatggtgaccaatgaatctcccttaaagtacttattcagaccagaagaaattgaattgcttatatgtggaagccggaatctagatttccaagcactagaagaaactacagaatatgacggtggctataccagggactctgttctgattagggagttctgggaaatcgttcattcatttacagatgaacagaaaagactcttcttgcagtttacaacgggcacagacagagcacctgtgggaggactaggaaaattaaagatgattatagccaaaaatggcccagacacagaaaggttacctacatctcatacttgctttaatgtgcttttacttccggaatactcaagcaaagaaaaacttaaagagagattgttgaaggccatcacgtatgccaaaggatttggcatgctgtaaaacaaaacaaaacaaaataaaacaaaaaaaaggaaggaaaaaaaaagaaaaaatttaaaaaattttaaaaatataacgagggataaatttttggtggtgatagtgtcccagtacaaaaaggctgtaagatagtcaaccacagtagtcacctatgtctgtgcctcccttctttattggggacatgtgggctggaacagcagatttcagctacatatatgaacaaatcctttattattattataattatttttttgcgtgaaagtgttacatattctttcacttgtatgtacagagaggtttttctgaatatttattttaagggttaaatcacttttgcttgtgtttattactgcttgaggttgagccttttgagtatttaaaaaatatataccaacagaactactctcccaaggaaaatattgccaccatttgtagaccacgtaaccttcaagtatgtgctacttttttgtccctgtatctaactcaaatcaggaactgtattttttttaatgatttgcttttgaaacttgaagtcttgaaaacagtgtgatgcaattactgctgttctagcccccaaagagttttctgtgcaaaatcttgagaatcaatcaataaagaaagatggaaggaagggagaaattggaatgttttaactgcagccctcagaactttagtaacagcacaacaaattaaaaacaaaaacaactcatgccacagtatgtcgtcttcatgtgtcttgcaatgaactgtttcagtagccaatcctctttcttagtatatgaaaggacagggatttttgttcttgttgttctcgttgttgttttaagtttactggggaaagtgcatttggccaaatgaaatggtagtcaagcctattgcaacaaagttaggaagtttgttgtttgtttattataaacaaaaagcatgtgaaagtgcacttaagatagagtttttattaattacttacttattacctagattttaaatagacaatccaaagtctccccttcgtgttgccatcatcttgttgaatcagccattttatcgaggcacgtgatcagtgttgcaacataatgaaaaagatggctactgtgccttgtgttacttaatcatacagtaagctgacctggaaatgaatgaaactattactcctaagaattacattgtatagccccacagattaaatttaattaattaattcaaaacatgttaaacgttactttcatgtactatggaaaagtacaagtaggtttacattactgatttccagaagtaagtagtttcccctttcctagtcttctgtgtatgtgatgttgttaatttcttttattgcattataaaataaaaggattatgtatttttaactaaggtgagacattgatatatccttttgctacaagctatagctaatgtgctgagcttgtgccttggtgattgattgattgattgactgattgttttaactgattactgtagatcaacctgatgatttgtttgtttgaaattggcaggaaaaatgcagctttcaaatcattggggggagaaaaaggatgtctttcaggattattttaattaatttttttcataattgagacagaactgtttgttatgtaccataatgctaaataaaactgtggcacttttcaccataatttaatttagtggaaaaagaagacaatgctttccatattgtgataaggtaacatggggtttttctgggccagcctttagaacactgttagggtacatacgctaccttgatgaaagggaccttcgtgcaactgtagtcatcttaaaggcttctcatccactgtgcttcttaatgtgtaattaaagtgaggagaaattaaatactctgagggcgttttatataataaattcgtgaagaaatgtgtgctcttcagttctc

SEQ ID NO: 673 - DNA, 5319 bp, Homo sapiens
  source 1..5319: mol_type = genomic DNA
gctgcctgccgggatactcggcccgcccagccagtcctcccgtcttgcgccgcggccgcgagatccgtgtgtctcccaagatggtggcgctgggctcggggtgactacaggagacgacggggccttttcccttcgccaggacccgacacaccaggcttcgctcgctcgcgcacccctccgccgcgtagccatccgccagcgcgggcgcccgccatccgccgcctacttacgcttcacctctgccgacccggcgcgctcggctgcgggcggcggcgcctccttcggctcctcctcggaatagctcgcggcctgtagcccctggcaggagggcccctcagccccccggtgtggacaggcagcggcggctggcgacgaacgccgggatttcggcggccccggcgctccctttcccggcctcgttttccggataaggaagcgcgggtcccgcatgagccccggcggtggcggcagcgaaagagaacgaggcggtggcgggcggaggcggcgggcgagggcgactacgaccagtgaggcggccgccgcagcccaggcgcgggggcgacgacaggttaaaaatctgtaagagcctgattttagaattcaccagctcctcagaagtttggcgaaatatgagttattaagcctacgctcagatcaaggtagcagctagactggtgtgacaacctgtttttaatcagtgactcaaagctgtgatcaccctgatgtcaccgaatggccacagcttgtaaaagagagttacagtggaggtaaaaggagtggcttgcaggatggagaagctgcaccagtgttattggaaatcaggagaacctcagtctgacgacattgaagctagccgaatgaagcgagcagctgcaaagcatctaatagaacgctactaccaccagttaactgagggctgtggaaatgaagcctgcacgaatgagttttgtgcttcctgtccaacttttcttcgtatggataataatgcagcagctattaaagccctcgagctttataagattaatgcaaaactctgtgatcctcatccctccaagaaaggagcaagctcagcttaccttgagaactcgaaaggtgcccccaacaactcctgctctgagataaaaatgaacaagaaaggcgctagaattgattttaaagatgtgacttacttaacagaagagaaggtatatgaaattcttgaattatgtagagaaagagaggattattcccctttaatccgtgttattggaagagttttttctagtgctgaggcattggtacagagcttccggaaagttaaacaacacaccaaggaagaactgaaatctcttcaagcaaaagatgaagacaaagatgaagatgaaaaggaaaaagctgcatgttctgctgctgctatggaagaagactcagaagcatcttcctcaaggataggtgatagctcacagggagacaacaatttgcaaaaattaggccctgatgatgtgtctgtggatattgatgccattagaagggtctacaccagattgctctctaatgaaaaaattgaaactgcctttctcaatgcacttgtatatttgtcacctaacgtggaatgtgacttgacgtatcacaatgtatactctcgagatcctaattatctgaatttgttcattatcgtaatggagaatagaaatctccacagtcctgaatatctggaaatggctttgccattattttgcaaagcgatgagcaagctaccccttgcagcccaaggaaaactgatcagactgtggtctaaatacaatgcagaccagattcggagaatgatggagacatttcagcaacttattacttataaagtcataagcaatgaatttaacagtcgaaatctagtgaatgatgatgatgccattgttgctgcttcgaagtgcttgaaaatggtttactatgcaaatgtagtgggaggggaagtggacacaaatcacaatgaagaagatgatgaagagcccatccctgagtccagcgagctgacacttcaggaacttttgggagaagaaagaagaaacaagaaaggtcctcgagtggaccccctggaaactgaacttggtgttaaaaccctggattgtcgaaaaccacttatcccttttgaagagtttattaatgaaccactgaatgaggttctagaaatggataaagattatacttttttcaaagtagaaacagagaacaaattctcttttatgacatgtccctttatattgaatgctgtcacaaagaatttgggattatattatgacaatagaattcgcatgtacagtgaacgaagaatcactgttctctacagcttagttcaaggacagcagttgaatccatatttgagactcaaagttagacgtgaccatatcatagatgatgcacttgtccggctagagatgatcgctatggaaaatcctgcagacttgaagaagcagttgtatgtggaatttgaaggagaacaaggagttgatgagggaggtgtttccaaagaattttttcagctggttgtggaggaaatcttcaatccagatattggtatgttcacatacgatgaatctacaaaattgttttggtttaatccatcttcttttgaaactgagggtcagtttactctgattggcatagtactgggtctggctatttacaataactgtatactggatgtacattttcccatggttgtctacaggaagctaatggggaaaaaaggaacttttcgtgacttgggagactctcacccagttctatatcagagtttaaaagatttattggagtatgaagggaatgtggaagatgacatgatgatcactttccagatatcacagacagatctttttggtaacccaatgatgtatgatctaaaggaaaatggtgataaaattccaattacaaatgaaaacaggaaggaatttgtcaatctttattctgactacattctcaataaatcagtagaaaaacagttcaaggcttttcggagaggttttcatatggtgaccaatgaatctcccttaaagtacttattcagaccagaagaaattgaattgcttatatgtggaagccggaatctagatttccaagcactagaagaaactacagaatatgacggtggctataccagggactctgttctgattagggagttctgggaaatcgttcattcatttacagatgaacagaaaagactcttcttgcagtttacaacgggcacagacagagcacctgtgggaggactaggaaaattaaagatgattatagccaaaaatggcccagacacagaaaggttacctacatctcatacttgctttaatgtgcttttacttccggaatactcaagcaaagaaaaacttaaagagagattgttgaaggccatcacgtatgccaaaggatttggcatgctgtaaaacaaaacaaaacaaaataaaacaaaaaaaaggaaggaaaaaaaaagaaaaaatttaaaaaattttaaaaatataacgagggataaatttttggtggtgatagtgtcccagtacaaaaaggctgtaagatagtcaaccacagtagtcacctatgtctgtgcctcccttctttattggggacatgtgggctggaacagcagatttcagctacatatatgaacaaatcctttattattattataattatttttttgcgtgaaagtgttacatattctttcacttgtatgtacagagaggtttttctgaatatttattttaagggttaaatcacttttgcttgtgtttattactgcttgaggttgagccttttgagtatttaaaaaatatataccaacagaactactctcccaaggaaaatattgccaccatttgtagaccacgtaaccttcaagtatgtgctacttttttgtccctgtatctaactcaaatcaggaactgtattttttttaatgatttgcttttgaaacttgaagtcttgaaaacagtgtgatgcaattactgctgttctagcccccaaagagttttctgtgcaaaatcttgagaatcaatcaataaagaaagatggaaggaagggagaaattggaatgttttaactgcagccctcagaactttagtaacagcacaacaaattaaaaacaaaaacaactcatgccacagtatgtcgtcttcatgtgtcttgcaatgaactgtttcagtagccaatcctctttcttagtatatgaaaggacagggatttttgttcttgttgttctcgttgttgttttaagtttactggggaaagtgcatttggccaaatgaaatggtagtcaagcctattgcaacaaagttaggaagtttgttgtttgtttattataaacaaaaagcatgtgaaagtgcacttaagatagagtttttattaattacttacttattacctagattttaaatagacaatccaaagtctccccttcgtgttgccatcatcttgttgaatcagccattttatcgaggcacgtgatcagtgttgcaacataatgaaaaagatggctactgtgccttgtgttacttaatcatacagtaagctgacctggaaatgaatgaaactattactcctaagaattacattgtatagccccacagattaaatttaattaattaattcaaaacatgttaaacgttactttcatgtactatggaaaagtacaagtaggtttacattactgatttccagaagtaagtagtttcccctttcctagtcttctgtgtatgtgatgttgttaatttcttttattgcattataaaataaaaggattatgtatttttaactaaggtgagacattgatatatccttttgctacaagctatagctaatgtgctgagcttgtgccttggtgattgattgattgattgactgattgttttaactgattactgtagatcaacctgatgatttgtttgtttgaaattggcaggaaaaatgcagctttcaaatcattggggggagaaaaaggatgtctttcaggattattttaattaatttttttcataattgagacagaactgtttgttatgtaccataatgctaaataaaactgtggcacttttcaccataatttaatttagtggaaaaagaagacaatgctttccatattgtgataaggtaacatggggtttttctgggccagcctttagaacactgttagggtacatacgctaccttgatgaaagggaccttcgtgcaactgtagtcatcttaaaggcttctcatccactgtgcttcttaatgtgtaattaaagtgaggagaaattaaatactctgagggcgttttatataataaattcgtgaagaaatgtgtgctcttca

SEQ ID NO: 674 - DNA, 4863 bp, Homo sapiens
  source 1..4863: mol_type = genomic DNA
ggggcggggcgggacgtgcgaggcgtcgagatttgggcctcctaggagccaggctcttcgagccagccggggccccagacagggaagggcaggccctttccttcaaaggggagccctttctcggcgttttcaaggtttttggctctcttggggaagacatatttagccgtgtgcttggttaaaaatctgtaagagcctgattttagaattcaccagctcctcagaagtttggcgaaatatgagttattaagcctacgctcagatcaaggtagcagctagactggtgtgacaacctgtttttaatcagtgactcaaagctgtgatcaccctgatgtcaccgaatggccacagcttgtaaaagatcaggagaacctcagtctgacgacattgaagctagccgaatgaagcgagcagctgcaaagcatctaatagaacgctactaccaccagttaactgagggctgtggaaatgaagcctgcacgaatgagttttgtgcttcctgtccaacttttcttcgtatggataataatgcagcagctattaaagccctcgagctttataagattaatgcaaaactctgtgatcctcatccctccaagaaaggagcaagctcagcttaccttgagaactcgaaaggtgcccccaacaactcctgctctgagataaaaatgaacaagaaaggcgctagaattgattttaaagatgtgacttacttaacagaagagaaggtatatgaaattcttgaattatgtagagaaagagaggattattcccctttaatccgtgttattggaagagttttttctagtgctgaggcattggtacagagcttccggaaagttaaacaacacaccaaggaagaactgaaatctcttcaagcaaaagatgaagacaaagatgaagatgaaaaggaaaaagctgcatgttctgctgctgctatggaagaagactcagaagcatcttcctcaaggataggtgatagctcacagggagacaacaatttgcaaaaattaggccctgatgatgtgtctgtggatattgatgccattagaagggtctacaccagattgctctctaatgaaaaaattgaaactgcctttctcaatgcacttgtatatttgtcacctaacgtggaatgtgacttgacgtatcacaatgtatactctcgagatcctaattatctgaatttgttcattatcgtaatggagaatagaaatctccacagtcctgaatatctggaaatggctttgccattattttgcaaagcgatgagcaagctaccccttgcagcccaaggaaaactgatcagactgtggtctaaatacaatgcagaccagattcggagaatgatggagacatttcagcaacttattacttataaagtcataagcaatgaatttaacagtcgaaatctagtgaatgatgatgatgccattgttgctgcttcgaagtgcttgaaaatggtttactatgcaaatgtagtgggaggggaagtggacacaaatcacaatgaagaagatgatgaagagcccatccctgagtccagcgagctgacacttcaggaacttttgggagaagaaagaagaaacaagaaaggtcctcgagtggaccccctggaaactgaacttggtgttaaaaccctggattgtcgaaaaccacttatcccttttgaagagtttattaatgaaccactgaatgaggttctagaaatggataaagattatacttttttcaaagtagaaacagagaacaaattctcttttatgacatgtccctttatattgaatgctgtcacaaagaatttgggattatattatgacaatagaattcgcatgtacagtgaacgaagaatcactgttctctacagcttagttcaaggacagcagttgaatccatatttgagactcaaagttagacgtgaccatatcatagatgatgcacttgtccggctagagatgatcgctatggaaaatcctgcagacttgaagaagcagttgtatgtggaatttgaaggagaacaaggagttgatgagggaggtgtttccaaagaattttttcagctggttgtggaggaaatcttcaatccagatattggtatgttcacatacgatgaatctacaaaattgttttggtttaatccatcttcttttgaaactgagggtcagtttactctgattggcatagtactgggtctggctatttacaataactgtatactggatgtacattttcccatggttgtctacaggaagctaatggggaaaaaaggaacttttcgtgacttgggagactctcacccagttctatatcagagtttaaaagatttattggagtatgaagggaatgtggaagatgacatgatgatcactttccagatatcacagacagatctttttggtaacccaatgatgtatgatctaaaggaaaatggtgataaaattccaattacaaatgaaaacaggaaggaatttgtcaatctttattctgactacattctcaataaatcagtagaaaaacagttcaaggcttttcggagaggttttcatatggtgaccaatgaatctcccttaaagtacttattcagaccagaagaaattgaattgcttatatgtggaagccggaatctagatttccaagcactagaagaaactacagaatatgacggtggctataccagggactctgttctgattagggagttctgggaaatcgttcattcatttacagatgaacagaaaagactcttcttgcagtttacaacgggcacagacagagcacctgtgggaggactaggaaaattaaagatgattatagccaaaaatggcccagacacagaaaggttacctacatctcatacttgctttaatgtgcttttacttccggaatactcaagcaaagaaaaacttaaagagagattgttgaaggccatcacgtatgccaaaggatttggcatgctgtaaaacaaaacaaaacaaaataaaacaaaaaaaaggaaggaaaaaaaaagaaaaaatttaaaaaattttaaaaatataacgagggataaatttttggtggtgatagtgtcccagtacaaaaaggctgtaagatagtcaaccacagtagtcacctatgtctgtgcctcccttctttattggggacatgtgggctggaacagcagatttcagctacatatatgaacaaatcctttattattattataattatttttttgcgtgaaagtgttacatattctttcacttgtatgtacagagaggtttttctgaatatttattttaagggttaaatcacttttgcttgtgtttattactgcttgaggttgagccttttgagtatttaaaaaatatataccaacagaactactctcccaaggaaaatattgccaccatttgtagaccacgtaaccttcaagtatgtgctacttttttgtccctgtatctaactcaaatcaggaactgtattttttttaatgatttgcttttgaaacttgaagtcttgaaaacagtgtgatgcaattactgctgttctagcccccaaagagttttctgtgcaaaatcttgagaatcaatcaataaagaaagatggaaggaagggagaaattggaatgttttaactgcagccctcagaactttagtaacagcacaacaaattaaaaacaaaaacaactcatgccacagtatgtcgtcttcatgtgtcttgcaatgaactgtttcagtagccaatcctctttcttagtatatgaaaggacagggatttttgttcttgttgttctcgttgttgttttaagtttactggggaaagtgcatttggccaaatgaaatggtagtcaagcctattgcaacaaagttaggaagtttgttgtttgtttattataaacaaaaagcatgtgaaagtgcacttaagatagagtttttattaattacttacttattacctagattttaaatagacaatccaaagtctccccttcgtgttgccatcatcttgttgaatcagccattttatcgaggcacgtgatcagtgttgcaacataatgaaaaagatggctactgtgccttgtgttacttaatcatacagtaagctgacctggaaatgaatgaaactattactcctaagaattacattgtatagccccacagattaaatttaattaattaattcaaaacatgttaaacgttactttcatgtactatggaaaagtacaagtaggtttacattactgatttccagaagtaagtagtttcccctttcctagtcttctgtgtatgtgatgttgttaatttcttttattgcattataaaataaaaggattatgtatttttaactaaggtgagacattgatatatccttttgctacaagctatagctaatgtgctgagcttgtgccttggtgattgattgattgattgactgattgttttaactgattactgtagatcaacctgatgatttgtttgtttgaaattggcaggaaaaatgcagctttcaaatcattggggggagaaaaaggatgtctttcaggattattttaattaatttttttcataattgagacagaactgtttgttatgtaccataatgctaaataaaactgtggcacttttcaccataatttaatttagtggaaaaagaagacaatgctttccatattgtgataaggtaacatggggtttttctgggccagcctttagaacactgttagggtacatacgctaccttgatgaaagggaccttcgtgcaactgtagtcatcttaaaggcttctcatccactgtgcttcttaatgtgtaattaaagtgaggagaaattaaatactctgagggcgttttatataataaattcgtgaagaaatgtgtgctcttca

SEQ ID NO: 675 - DNA, 5124 bp, Homo sapiens
  source 1..5124: mol_type = genomic DNA
ggggcggggcgggacgtgcgaggcgtcgagatttgggcctcctaggagccaggctcttcgagccagccggggccccagacagggaagggcaggccctttccttcaaaggggagccctttctcggcgttttcaaggtttttggctctcttggggaagacatatttagccgtgtgcttggttaaaaatctgtaagagcctgattttagaattcaccagctcctcagaagtttggcgaaatatgagttattaagcctacgctcagatcaaggtagcagctagactggtgtgacaacctgtttttaatcagtgactcaaagctgtgatcaccctgatgtcaccgaatggccacagcttgtaaaagagagttacagtggaggtaaaaggagtggcttgcaggatggagaagctgcaccagtgttattggaatgccagcaggtttattttttgttttgcaagccagctctgcctccttacagtatgacatctgatgctggagggtcgcactttcaaaaatgagtcagctggtacatggggttatcatcaatttttagctcttctgtctgggagatacaagtttggaagcaatcttggggtacttacccacaaggctggtggagaccagatcaggagaacctcagtctgacgacattgaagctagccgaatgaagcgagcagctgcaaagcatctaatagaacgctactaccaccagttaactgagggctgtggaaatgaagcctgcacgaatgagttttgtgcttcctgtccaacttttcttcgtatggataataatgcagcagctattaaagccctcgagctttataagattaatgcaaaactctgtgatcctcatccctccaagaaaggagcaagctcagcttaccttgagaactcgaaaggtgcccccaacaactcctgctctgagataaaaatgaacaagaaaggcgctagaattgattttaaagatgtgacttacttaacagaagagaaggtatatgaaattcttgaattatgtagagaaagagaggattattcccctttaatccgtgttattggaagagttttttctagtgctgaggcattggtacagagcttccggaaagttaaacaacacaccaaggaagaactgaaatctcttcaagcaaaagatgaagacaaagatgaagatgaaaaggaaaaagctgcatgttctgctgctgctatggaagaagactcagaagcatcttcctcaaggataggtgatagctcacagggagacaacaatttgcaaaaattaggccctgatgatgtgtctgtggatattgatgccattagaagggtctacaccagattgctctctaatgaaaaaattgaaactgcctttctcaatgcacttgtatatttgtcacctaacgtggaatgtgacttgacgtatcacaatgtatactctcgagatcctaattatctgaatttgttcattatcgtaatggagaatagaaatctccacagtcctgaatatctggaaatggctttgccattattttgcaaagcgatgagcaagctaccccttgcagcccaaggaaaactgatcagactgtggtctaaatacaatgcagaccagattcggagaatgatggagacatttcagcaacttattacttataaagtcataagcaatgaatttaacagtcgaaatctagtgaatgatgatgatgccattgttgctgcttcgaagtgcttgaaaatggtttactatgcaaatgtagtgggaggggaagtggacacaaatcacaatgaagaagatgatgaagagcccatccctgagtccagcgagctgacacttcaggaacttttgggagaagaaagaagaaacaagaaaggtcctcgagtggaccccctggaaactgaacttggtgttaaaaccctggattgtcgaaaaccacttatcccttttgaagagtttattaatgaaccactgaatgaggttctagaaatggataaagattatacttttttcaaagtagaaacagagaacaaattctcttttatgacatgtccctttatattgaatgctgtcacaaagaatttgggattatattatgacaatagaattcgcatgtacagtgaacgaagaatcactgttctctacagcttagttcaaggacagcagttgaatccatatttgagactcaaagttagacgtgaccatatcatagatgatgcacttgtccggctagagatgatcgctatggaaaatcctgcagacttgaagaagcagttgtatgtggaatttgaaggagaacaaggagttgatgagggaggtgtttccaaagaattttttcagctggttgtggaggaaatcttcaatccagatattggtatgttcacatacgatgaatctacaaaattgttttggtttaatccatcttcttttgaaactgagggtcagtttactctgattggcatagtactgggtctggctatttacaataactgtatactggatgtacattttcccatggttgtctacaggaagctaatggggaaaaaaggaacttttcgtgacttgggagactctcacccagttctatatcagagtttaaaagatttattggagtatgaagggaatgtggaagatgacatgatgatcactttccagatatcacagacagatctttttggtaacccaatgatgtatgatctaaaggaaaatggtgataaaattccaattacaaatgaaaacaggaaggaatttgtcaatctttattctgactacattctcaataaatcagtagaaaaacagttcaaggcttttcggagaggttttcatatggtgaccaatgaatctcccttaaagtacttattcagaccagaagaaattgaattgcttatatgtggaagccggaatctagatttccaagcactagaagaaactacagaatatgacggtggctataccagggactctgttctgattagggagttctgggaaatcgttcattcatttacagatgaacagaaaagactcttcttgcagtttacaacgggcacagacagagcacctgtgggaggactaggaaaattaaagatgattatagccaaaaatggcccagacacagaaaggttacctacatctcatacttgctttaatgtgcttttacttccggaatactcaagcaaagaaaaacttaaagagagattgttgaaggccatcacgtatgccaaaggatttggcatgctgtaaaacaaaacaaaacaaaataaaacaaaaaaaaggaaggaaaaaaaaagaaaaaatttaaaaaattttaaaaatataacgagggataaatttttggtggtgatagtgtcccagtacaaaaaggctgtaagatagtcaaccacagtagtcacctatgtctgtgcctcccttctttattggggacatgtgggctggaacagcagatttcagctacatatatgaacaaatcctttattattattataattatttttttgcgtgaaagtgttacatattctttcacttgtatgtacagagaggtttttctgaatatttattttaagggttaaatcacttttgcttgtgtttattactgcttgaggttgagccttttgagtatttaaaaaatatataccaacagaactactctcccaaggaaaatattgccaccatttgtagaccacgtaaccttcaagtatgtgctacttttttgtccctgtatctaactcaaatcaggaactgtattttttttaatgatttgcttttgaaacttgaagtcttgaaaacagtgtgatgcaattactgctgttctagcccccaaagagttttctgtgcaaaatcttgagaatcaatcaataaagaaagatggaaggaagggagaaattggaatgttttaactgcagccctcagaactttagtaacagcacaacaaattaaaaacaaaaacaactcatgccacagtatgtcgtcttcatgtgtcttgcaatgaactgtttcagtagccaatcctctttcttagtatatgaaaggacagggatttttgttcttgttgttctcgttgttgttttaagtttactggggaaagtgcatttggccaaatgaaatggtagtcaagcctattgcaacaaagttaggaagtttgttgtttgtttattataaacaaaaagcatgtgaaagtgcacttaagatagagtttttattaattacttacttattacctagattttaaatagacaatccaaagtctccccttcgtgttgccatcatcttgttgaatcagccattttatcgaggcacgtgatcagtgttgcaacataatgaaaaagatggctactgtgccttgtgttacttaatcatacagtaagctgacctggaaatgaatgaaactattactcctaagaattacattgtatagccccacagattaaatttaattaattaattcaaaacatgttaaacgttactttcatgtactatggaaaagtacaagtaggtttacattactgatttccagaagtaagtagtttcccctttcctagtcttctgtgtatgtgatgttgttaatttcttttattgcattataaaataaaaggattatgtatttttaactaaggtgagacattgatatatccttttgctacaagctatagctaatgtgctgagcttgtgccttggtgattgattgattgattgactgattgttttaactgattactgtagatcaacctgatgatttgtttgtttgaaattggcaggaaaaatgcagctttcaaatcattggggggagaaaaaggatgtctttcaggattattttaattaatttttttcataattgagacagaactgtttgttatgtaccataatgctaaataaaactgtggcacttttcaccataatttaatttagtggaaaaagaagacaatgctttccatattgtgataaggtaacatggggtttttctgggccagcctttagaacactgttagggtacatacgctaccttgatgaaagggaccttcgtgcaactgtagtcatcttaaaggcttctcatccactgtgcttcttaatgtgtaattaaagtgaggagaaattaaatactctgagggcgttttatataataaattcgtgaagaaatgtgtgctcttca

SEQ ID NO: 676 - DNA, 5028 bp, Homo sapiens
  source 1..5028: mol_type = genomic DNA
gctgcctgccgggatactcggcccgcccagccagtcctcccgtcttgcgccgcggccgcgagatccgtgtgtctcccaagatggtggcgctgggctcggggtgactacaggagacgacggggccttttcccttcgccaggacccgacacaccaggcttcgctcgctcgcgcacccctccgccgcgtagccatccgccagcgcgggcgcccgccatccgccgcctacttacgcttcacctctgccgacccggcgcgctcggctgcgggcggcggcgcctccttcggctcctcctcggaatagctcgcggcctgtagcccctggcaggagggcccctcagccccccggtgtggacaggcagcggcggctggcgacgaacgccgggatttcggcggccccggcgctccctttcccggcctcgttttccggataaggaagcgcgggtcccgcatgagccccggcggtggcggcagcgaaagagaacgaggcggtggcgggcggaggcggcgggcgagggcgactacgaccagtgaggcggccgccgcagcccaggcgcgggggcgacgacaggaagcgagcagctgcaaagcatctaatagaacgctactaccaccagttaactgagggctgtggaaatgaagcctgcacgaatgagttttgtgcttcctgtccaacttttcttcgtatggataataatgcagcagctattaaagccctcgagctttataagattaatgcaaaactctgtgatcctcatccctccaagaaaggagcaagctcagcttaccttgagaactcgaaaggtgcccccaacaactcctgctctgagataaaaatgaacaagaaaggcgctagaattgattttaaagatgtgacttacttaacagaagagaaggtatatgaaattcttgaattatgtagagaaagagaggattattcccctttaatccgtgttattggaagagttttttctagtgctgaggcattggtacagagcttccggaaagttaaacaacacaccaaggaagaactgaaatctcttcaagcaaaagatgaagacaaagatgaagatgaaaaggaaaaagctgcatgttctgctgctgctatggaagaagactcagaagcatcttcctcaaggataggtgatagctcacagggagacaacaatttgcaaaaattaggccctgatgatgtgtctgtggatattgatgccattagaagggtctacaccagattgctctctaatgaaaaaattgaaactgcctttctcaatgcacttgtatatttgtcacctaacgtggaatgtgacttgacgtatcacaatgtatactctcgagatcctaattatctgaatttgttcattatcgtaatggagaatagaaatctccacagtcctgaatatctggaaatggctttgccattattttgcaaagcgatgagcaagctaccccttgcagcccaaggaaaactgatcagactgtggtctaaatacaatgcagaccagattcggagaatgatggagacatttcagcaacttattacttataaagtcataagcaatgaatttaacagtcgaaatctagtgaatgatgatgatgccattgttgctgcttcgaagtgcttgaaaatggtttactatgcaaatgtagtgggaggggaagtggacacaaatcacaatgaagaagatgatgaagagcccatccctgagtccagcgagctgacacttcaggaacttttgggagaagaaagaagaaacaagaaaggtcctcgagtggaccccctggaaactgaacttggtgttaaaaccctggattgtcgaaaaccacttatcccttttgaagagtttattaatgaaccactgaatgaggttctagaaatggataaagattatacttttttcaaagtagaaacagagaacaaattctcttttatgacatgtccctttatattgaatgctgtcacaaagaatttgggattatattatgacaatagaattcgcatgtacagtgaacgaagaatcactgttctctacagcttagttcaaggacagcagttgaatccatatttgagactcaaagttagacgtgaccatatcatagatgatgcacttgtccggctagagatgatcgctatggaaaatcctgcagacttgaagaagcagttgtatgtggaatttgaaggagaacaaggagttgatgagggaggtgtttccaaagaattttttcagctggttgtggaggaaatcttcaatccagatattggtatgttcacatacgatgaatctacaaaattgttttggtttaatccatcttcttttgaaactgagggtcagtttactctgattggcatagtactgggtctggctatttacaataactgtatactggatgtacattttcccatggttgtctacaggaagctaatggggaaaaaaggaacttttcgtgacttgggagactctcacccagttctatatcagagtttaaaagatttattggagtatgaagggaatgtggaagatgacatgatgatcactttccagatatcacagacagatctttttggtaacccaatgatgtatgatctaaaggaaaatggtgataaaattccaattacaaatgaaaacaggaaggaatttgtcaatctttattctgactacattctcaataaatcagtagaaaaacagttcaaggcttttcggagaggttttcatatggtgaccaatgaatctcccttaaagtacttattcagaccagaagaaattgaattgcttatatgtggaagccggaatctagatttccaagcactagaagaaactacagaatatgacggtggctataccagggactctgttctgattagggagttctgggaaatcgttcattcatttacagatgaacagaaaagactcttcttgcagtttacaacgggcacagacagagcacctgtgggaggactaggaaaattaaagatgattatagccaaaaatggcccagacacagaaaggttacctacatctcatacttgctttaatgtgcttttacttccggaatactcaagcaaagaaaaacttaaagagagattgttgaaggccatcacgtatgccaaaggatttggcatgctgtaaaacaaaacaaaacaaaataaaacaaaaaaaaggaaggaaaaaaaaagaaaaaatttaaaaaattttaaaaatataacgagggataaatttttggtggtgatagtgtcccagtacaaaaaggctgtaagatagtcaaccacagtagtcacctatgtctgtgcctcccttctttattggggacatgtgggctggaacagcagatttcagctacatatatgaacaaatcctttattattattataattatttttttgcgtgaaagtgttacatattctttcacttgtatgtacagagaggtttttctgaatatttattttaagggttaaatcacttttgcttgtgtttattactgcttgaggttgagccttttgagtatttaaaaaatatataccaacagaactactctcccaaggaaaatattgccaccatttgtagaccacgtaaccttcaagtatgtgctacttttttgtccctgtatctaactcaaatcaggaactgtattttttttaatgatttgcttttgaaacttgaagtcttgaaaacagtgtgatgcaattactgctgttctagcccccaaagagttttctgtgcaaaatcttgagaatcaatcaataaagaaagatggaaggaagggagaaattggaatgttttaactgcagccctcagaactttagtaacagcacaacaaattaaaaacaaaaacaactcatgccacagtatgtcgtcttcatgtgtcttgcaatgaactgtttcagtagccaatcctctttcttagtatatgaaaggacagggatttttgttcttgttgttctcgttgttgttttaagtttactggggaaagtgcatttggccaaatgaaatggtagtcaagcctattgcaacaaagttaggaagtttgttgtttgtttattataaacaaaaagcatgtgaaagtgcacttaagatagagtttttattaattacttacttattacctagattttaaatagacaatccaaagtctccccttcgtgttgccatcatcttgttgaatcagccattttatcgaggcacgtgatcagtgttgcaacataatgaaaaagatggctactgtgccttgtgttacttaatcatacagtaagctgacctggaaatgaatgaaactattactcctaagaattacattgtatagccccacagattaaatttaattaattaattcaaaacatgttaaacgttactttcatgtactatggaaaagtacaagtaggtttacattactgatttccagaagtaagtagtttcccctttcctagtcttctgtgtatgtgatgttgttaatttcttttattgcattataaaataaaaggattatgtatttttaactaaggtgagacattgatatatccttttgctacaagctatagctaatgtgctgagcttgtgccttggtgattgattgattgattgactgattgttttaactgattactgtagatcaacctgatgatttgtttgtttgaaattggcaggaaaaatgcagctttcaaatcattggggggagaaaaaggatgtctttcaggattattttaattaatttttttcataattgagacagaactgtttgttatgtaccataatgctaaataaaactgtggcacttttcaccataatttaatttagtggaaaaagaagacaatgctttccatattgtgataaggtaacatggggtttttctgggccagcctttagaacactgttagggtacatacgctaccttgatgaaagggaccttcgtgcaactgtagtcatcttaaaggcttctcatccactgtgcttcttaatgtgtaattaaagtgaggagaaattaaatactctgagggcgttttatataataaattcgtgaagaaatgtgtgctcttca

SEQ ID NO: 677 - DNA, 3819 bp, Homo sapiens
  source 1..3819: mol_type = genomic DNA
gctgcctgccgggatactcggcccgcccagccagtcctcccgtcttgcgccgcggccgcgagatccgtgtgtctcccaagatggtggcgctgggctcggggtgactacaggagacgacggggccttttcccttcgccaggacccgacacaccaggcttcgctcgctcgcgcacccctccgccgcgtagccatccgccagcgcgggcgcccgccatccgccgcctacttacgcttcacctctgccgacccggcgcgctcggctgcgggcggcggcgcctccttcggctcctcctcggaatagctcgcggcctgtagcccctggcaggagggcccctcagccccccggtgtggacaggcagcggcggctggcgacgaacgccgggatttcggcggccccggcgctccctttcccggcctcgttttccggataaggaagcgcgggtcccgcatgagccccggcggtggcggcagcgaaagagaacgaggcggtggcgggcggaggcggcgggcgagggcgactacgaccagtgaggcggccgccgcagcccaggcgcgggggcgacgacagatcaggagaacctcagtctgacgacattgaagctagccgaatgaagcgagcagctgcaaagcatctaatagaacgctactaccaccagttaactgagggctgtggaaatgaagcctgcacgaatgagttttgtgcttcctgtccaacttttcttcgtatggataataatgcagcagctattaaagccctcgagctttataagattaatgcaaaactctgtgatcctcatccctccaagaaaggagcaagctcagcttaccttgagaactcgaaaggtgcccccaacaactcctgctctgagataaaaatgaacaagaaaggcgctagaattgattttaaagagatgatcgctatggaaaatcctgcagacttgaagaagcagttgtatgtggaatttgaaggagaacaaggagttgatgagggaggtgtttccaaagaattttttcagctggttgtggaggaaatcttcaatccagatattggtatgttcacatacgatgaatctacaaaattgttttggtttaatccatcttcttttgaaactgagggtcagtttactctgattggcatagtactgggtctggctatttacaataactgtatactggatgtacattttcccatggttgtctacaggaagctaatggggaaaaaaggaacttttcgtgacttgggagactctcacccagttctatatcagagtttaaaagatttattggagtatgaagggaatgtggaagatgacatgatgatcactttccagatatcacagacagatctttttggtaacccaatgatgtatgatctaaaggaaaatggtgataaaattccaattacaaatgaaaacaggaaggaatttgtcaatctttattctgactacattctcaataaatcagtagaaaaacagttcaaggcttttcggagaggttttcatatggtgaccaatgaatctcccttaaagtacttattcagaccagaagaaattgaattgcttatatgtggaagccggaatctagatttccaagcactagaagaaactacagaatatgacggtggctataccagggactctgttctgattagggagttctgggaaatcgttcattcatttacagatgaacagaaaagactcttcttgcagtttacaacgggcacagacagagcacctgtgggaggactaggaaaattaaagatgattatagccaaaaatggcccagacacagaaaggttacctacatctcatacttgctttaatgtgcttttacttccggaatactcaagcaaagaaaaacttaaagagagattgttgaaggccatcacgtatgccaaaggatttggcatgctgtaaaacaaaacaaaacaaaataaaacaaaaaaaaggaaggaaaaaaaaagaaaaaatttaaaaaattttaaaaatataacgagggataaatttttggtggtgatagtgtcccagtacaaaaaggctgtaagatagtcaaccacagtagtcacctatgtctgtgcctcccttctttattggggacatgtgggctggaacagcagatttcagctacatatatgaacaaatcctttattattattataattatttttttgcgtgaaagtgttacatattctttcacttgtatgtacagagaggtttttctgaatatttattttaagggttaaatcacttttgcttgtgtttattactgcttgaggttgagccttttgagtatttaaaaaatatataccaacagaactactctcccaaggaaaatattgccaccatttgtagaccacgtaaccttcaagtatgtgctacttttttgtccctgtatctaactcaaatcaggaactgtattttttttaatgatttgcttttgaaacttgaagtcttgaaaacagtgtgatgcaattactgctgttctagcccccaaagagttttctgtgcaaaatcttgagaatcaatcaataaagaaagatggaaggaagggagaaattggaatgttttaactgcagccctcagaactttagtaacagcacaacaaattaaaaacaaaaacaactcatgccacagtatgtcgtcttcatgtgtcttgcaatgaactgtttcagtagccaatcctctttcttagtatatgaaaggacagggatttttgttcttgttgttctcgttgttgttttaagtttactggggaaagtgcatttggccaaatgaaatggtagtcaagcctattgcaacaaagttaggaagtttgttgtttgtttattataaacaaaaagcatgtgaaagtgcacttaagatagagtttttattaattacttacttattacctagattttaaatagacaatccaaagtctccccttcgtgttgccatcatcttgttgaatcagccattttatcgaggcacgtgatcagtgttgcaacataatgaaaaagatggctactgtgccttgtgttacttaatcatacagtaagctgacctggaaatgaatgaaactattactcctaagaattacattgtatagccccacagattaaatttaattaattaattcaaaacatgttaaacgttactttcatgtactatggaaaagtacaagtaggtttacattactgatttccagaagtaagtagtttcccctttcctagtcttctgtgtatgtgatgttgttaatttcttttattgcattataaaataaaaggattatgtatttttaactaaggtgagacattgatatatccttttgctacaagctatagctaatgtgctgagcttgtgccttggtgattgattgattgattgactgattgttttaactgattactgtagatcaacctgatgatttgtttgtttgaaattggcaggaaaaatgcagctttcaaatcattggggggagaaaaaggatgtctttcaggattattttaattaatttttttcataattgagacagaactgtttgttatgtaccataatgctaaataaaactgtggcacttttcaccataatttaatttagtggaaaaagaagacaatgctttccatattgtgataaggtaacatggggtttttctgggccagcctttagaacactgttagggtacatacgctaccttgatgaaagggaccttcgtgcaactgtagtcatcttaaaggcttctcatccactgtgcttcttaatgtgtaattaaagtgaggagaaattaaatactctgagggcgttttatataataaattcgtgaagaaatgtgtgctcttca

SEQ ID NO: 678 - DNA, 4905 bp, Homo sapiens
  source 1..4905: mol_type = genomic DNA
gctgcctgccgggatactcggcccgcccagccagtcctcccgtcttgcgccgcggccgcgagatccgtgtgtctcccaagatggtggcgctgggctcggggtgactacaggagacgacggggccttttcccttcgccaggacccgacacaccaggcttcgctcgctcgcgcacccctccgccgcgtagccatccgccagcgcgggcgcccgccatccgccgcctacttacgcttcacctctgccgacccggcgcgctcggctgcgggcggcggcgcctccttcggctcctcctcggaatagctcgcggcctgtagcccctggcaggagggcccctcagccccccggtgtggacaggcagcggcggctggcgacgaacgccgggatttcggcggccccggcgctccctttcccggcctcgttttccggataaggaagcgcgggtcccgcatgagccccggcggtggcggcagcgaaagagaacgaggcggtggcgggcggaggcggcgggcgagggcgactacgaccagtgaggcggccgccgcagcccaggcgcgggggcgacgacagatcaggagaacctcagtctgacgacattgaagctagccgaatgaagcgagcagctgcaaagcatctaatagaacgctactaccaccagttaactgagggctgtggaaatgaagcctgcacgaatgagttttgtgcttcctgtccaacttttcttcgtatggataataatgcagcagctattaaagccctcgagctttataagattaatgcaaaactctgtgatcctcatccctccaagaaaggagcaagctcagcttaccttgagaactcgaaaggtgcccccaacaactcctgctctgagataaaaatgaacaagaaaggcgctagaattgattttaaagatgtgacttacttaacagaagagaaggtatatgaaattcttgaattatgtagagaaagagaggattattcccctttaatccgtgttattggaagagttttttctagtgctgaggcattggtacagagcttccggaaagttaaacaacacaccaaggaagaactgaaatctcttcaagcaaaagatgaagacaaagatgaagatgaaaaggaaaaagctgcatgttctgctgctgctatggaagaagactcagaagcatcttcctcaaggataggtgatagctcacagggagacaacaatttgcaaaaattaggccctgatgatgtgtctgtggatattgatgccattagaagggtctacaccagattgctctctaatgaaaaaattgaaactgcctttctcaatgcacttgtatatttgtcacctaacgtggaatgtgacttgacgtatcacaatgtatactctcgagatcctaattatctgaatttgttcattatcgtaatggagaatagaaatctccacagtcctgaatatctggaaatggctttgccattattttgcaaagcgatgagcaagctaccccttgcagcccaaggaaaactgatcagactgtggtctaaatacaatgcagaccagattcggagaatgatggagacatttcagcaacttattacttataaagtcataagcaatgaatttaacagtcgaaatctagtgaatgatgatgatgccattgttgctgcttcgaagtgcttgaaaatggtttactatgcaaatgtagtgggaggggaagtggacacaaatcacaatgaagaagatgatgaagagcccatccctgagtccagcgagctgacacttcaggaacttttgggagaagaaagaagaaacaagaaaggtcctcgagtggaccccctggaaactgaacttggtgttaaaaccctggattgtcgaaaaccacttatcccttttgaagagtttattaatgaaccactgaatgaggttctagaaatggataaagattatacttttttcaaagtagaaacagagaacaaattctcttttatgacatgtccctttatattgaatgctgtcacaaagaatttgggattatattatgacaatagaattcgcatgtacagtgaacgaagaatcactgttctctacagcttagttcaaggacagcagttgaatccatatttgagactcaaagttagacgtgaccatatcatagatgatgcacttgtccggctagagatgatcgctatggaaaatcctgcagacttgaagaagcagttgtatgtggaatttgaaggagaacaaggagttgatgagggaggtgtttccaaagaattttttcagctggttgtggaggaaatcttcaatccagatattggtatgttcacatacgatgaatctacaaaattgttttggtttaatccatcttcttttgaaactgagggtcagtttactctgattggcatagtactgggtctggctatttacaataactgtatactggatgtacattttcccatggttgtctacaggaagctaatggggaaaaaaggaacttttcgtgacttgggagactctcacccagaatttgtcaatctttattctgactacattctcaataaatcagtagaaaaacagttcaaggcttttcggagaggttttcatatggtgaccaatgaatctcccttaaagtacttattcagaccagaagaaattgaattgcttatatgtggaagccggaatctagatttccaagcactagaagaaactacagaatatgacggtggctataccagggactctgttctgattagggagttctgggaaatcgttcattcatttacagatgaacagaaaagactcttcttgcagtttacaacgggcacagacagagcacctgtgggaggactaggaaaattaaagatgattatagccaaaaatggcccagacacagaaaggttacctacatctcatacttgctttaatgtgcttttacttccggaatactcaagcaaagaaaaacttaaagagagattgttgaaggccatcacgtatgccaaaggatttggcatgctgtaaaacaaaacaaaacaaaataaaacaaaaaaaaggaaggaaaaaaaaagaaaaaatttaaaaaattttaaaaatataacgagggataaatttttggtggtgatagtgtcccagtacaaaaaggctgtaagatagtcaaccacagtagtcacctatgtctgtgcctcccttctttattggggacatgtgggctggaacagcagatttcagctacatatatgaacaaatcctttattattattataattatttttttgcgtgaaagtgttacatattctttcacttgtatgtacagagaggtttttctgaatatttattttaagggttaaatcacttttgcttgtgtttattactgcttgaggttgagccttttgagtatttaaaaaatatataccaacagaactactctcccaaggaaaatattgccaccatttgtagaccacgtaaccttcaagtatgtgctacttttttgtccctgtatctaactcaaatcaggaactgtattttttttaatgatttgcttttgaaacttgaagtcttgaaaacagtgtgatgcaattactgctgttctagcccccaaagagttttctgtgcaaaatcttgagaatcaatcaataaagaaagatggaaggaagggagaaattggaatgttttaactgcagccctcagaactttagtaacagcacaacaaattaaaaacaaaaacaactcatgccacagtatgtcgtcttcatgtgtcttgcaatgaactgtttcagtagccaatcctctttcttagtatatgaaaggacagggatttttgttcttgttgttctcgttgttgttttaagtttactggggaaagtgcatttggccaaatgaaatggtagtcaagcctattgcaacaaagttaggaagtttgttgtttgtttattataaacaaaaagcatgtgaaagtgcacttaagatagagtttttattaattacttacttattacctagattttaaatagacaatccaaagtctccccttcgtgttgccatcatcttgttgaatcagccattttatcgaggcacgtgatcagtgttgcaacataatgaaaaagatggctactgtgccttgtgttacttaatcatacagtaagctgacctggaaatgaatgaaactattactcctaagaattacattgtatagccccacagattaaatttaattaattaattcaaaacatgttaaacgttactttcatgtactatggaaaagtacaagtaggtttacattactgatttccagaagtaagtagtttcccctttcctagtcttctgtgtatgtgatgttgttaatttcttttattgcattataaaataaaaggattatgtatttttaactaaggtgagacattgatatatccttttgctacaagctatagctaatgtgctgagcttgtgccttggtgattgattgattgattgactgattgttttaactgattactgtagatcaacctgatgatttgtttgtttgaaattggcaggaaaaatgcagctttcaaatcattggggggagaaaaaggatgtctttcaggattattttaattaatttttttcataattgagacagaactgtttgttatgtaccataatgctaaataaaactgtggcacttttcaccataatttaatttagtggaaaaagaagacaatgctttccatattgtgataaggtaacatggggtttttctgggccagcctttagaacactgttagggtacatacgctaccttgatgaaagggaccttcgtgcaactgtagtcatcttaaaggcttctcatccactgtgcttcttaatgtgtaattaaagtgaggagaaattaaatactctgagggcgttttatataataaattcgtgaagaaatgtgtgctcttca

SEQ ID NO: 679 - DNA, 4914 bp, Homo sapiens
  source 1..4914: mol_type = genomic DNA
gctgcctgccgggatactcggcccgcccagccagtcctcccgtcttgcgccgcggccgcgagatccgtgtgtctcccaagatggtggcgctgggctcggggtgactacaggagacgacggggccttttcccttcgccaggacccgacacaccaggcttcgctcgctcgcgcacccctccgccgcgtagccatccgccagcgcgggcgcccgccatccgccgcctacttacgcttcacctctgccgacccggcgcgctcggctgcgggcggcggcgcctccttcggctcctcctcggaatagctcgcggcctgtagcccctggcaggagggcccctcagccccccggtgtggacaggcagcggcggctggcgacgaacgccgggatttcggcggccccggcgctccctttcccggcctcgttttccggataaggaagcgcgggtcccgcatgagccccggcggtggcggcagcgaaagagaacgaggcggtggcgggcggaggcggcgggcgagggcgactacgaccagtgaggcggccgccgcagcccaggcgcgggggcgacgacagatcaggagaacctcagtctgacgacattgaagctagccgaatgaagcgagcagctgcaaagcatctaatagaacgctactaccaccagttaactgagggctgtggaaatgaagcctgcacgaatgagttttgtgcttcctgtccaacttttcttcgtatggataataatgcagcagctattaaagccctcgagctttataagattaatgcaaaactctgtgatcctcatccctccaagaaaggagcaagctcagcttaccttgagaactcgaaaggtgcccccaacaactcctgctctgagataaaaatgaacaagaaaggcgctagaattgattttaaagatgtgacttacttaacagaagagaaggtatatgaaattcttgaattatgtagagaaagagaggattattcccctttaatccgtgttattggaagagttttttctagtgctgaggcattggtacagagcttccggaaagttaaacaacacaccaaggaagaactgaaatctcttcaagcaaaagatgaagacaaagatgaagatgaaaaggaaaaagctgcatgttctgctgctgctatggaagaagactcagaagcatcttcctcaaggataggtgatagctcacagggagacaacaatttgcaaaaattaggccctgatgatgtgtctgtggatattgatgccattagaagggtctacaccagattgctctctaatgaaaaaattgaaactgcctttctcaatgcacttgtatatttgtcacctaacgtggaatgtgacttgacgtatcacaatgtatactctcgagatcctaattatctgaatttgttcattatcgtaatggagaatagaaatctccacagtcctgaatatctggaaatggctttgccattattttgcaaagcgatgagcaagctaccccttgcagcccaaggaaaactgatcagactgtggtctaaatacaatgcagaccagattcggagaatgatggagacatttcagcaacttattacttataaagtcataagcaatgaatttaacagtcgaaatctagtgaatgatgatgatgccattgttgctgcttcgaagtgcttgaaaatggtttactatgcaaatgtagtgggaggggaagtggacacaaatcacaatgaagaagatgatgaagagcccatccctgagtccagcgagctgacacttcaggaacttttgggagaagaaagaagaaacaagaaaggtcctcgagtggaccccctggaaactgaacttggtgttaaaaccctggattgtcgaaaaccacttatcccttttgaagagtttattaatgaaccactgaatgaggttctagaaatggataaagattatacttttttcaaagtagaaacagagaacaaattctcttttatgacatgtccctttatattgaatgctgtcacaaagaatttgggattatattatgacaatagaattcgcatgtacagtgaacgaagaatcactgttctctacagcttagttcaaggacagcagttgaatccatatttgagactcaaagttagacgtgaccatatcatagatgatgcacttgtccggctagagatgatcgctatggaaaatcctgcagacttgaagaagcagttgtatgtggaatttgaaggagaacaaggagttgatgagggaggtgtttccaaagaattttttcagctggttgtggaggaaatcttcaatccagatattggtatgttcacatacgatgaatctacaaaattgttttggtttaatccatcttcttttgaaactgagggtcagtttactctgattggcatagtactgggtctggctatttacaataactgtatactggatgtacattttcccatggttgtctacaggaagctaatggggaaaaaaggaacttttcgtgacttgggagactctcacccagttctatatcagagtttaaaagatttattggagtatgaagggaatgtggaagatgacatgatgatcactttccagatatcacagacagatctttttggtaacccaatgatgtatgatctaaaggaaaatggtgataaaattccaattacaaatgaaaacaggaagaatctagatttccaagcactagaagaaactacagaatatgacggtggctataccagggactctgttctgattagggagttctgggaaatcgttcattcatttacagatgaacagaaaagactcttcttgcagtttacaacgggcacagacagagcacctgtgggaggactaggaaaattaaagatgattatagccaaaaatggcccagacacagaaaggttacctacatctcatacttgctttaatgtgcttttacttccggaatactcaagcaaagaaaaacttaaagagagattgttgaaggccatcacgtatgccaaaggatttggcatgctgtaaaacaaaacaaaacaaaataaaacaaaaaaaaggaaggaaaaaaaaagaaaaaatttaaaaaattttaaaaatataacgagggataaatttttggtggtgatagtgtcccagtacaaaaaggctgtaagatagtcaaccacagtagtcacctatgtctgtgcctcccttctttattggggacatgtgggctggaacagcagatttcagctacatatatgaacaaatcctttattattattataattatttttttgcgtgaaagtgttacatattctttcacttgtatgtacagagaggtttttctgaatatttattttaagggttaaatcacttttgcttgtgtttattactgcttgaggttgagccttttgagtatttaaaaaatatataccaacagaactactctcccaaggaaaatattgccaccatttgtagaccacgtaaccttcaagtatgtgctacttttttgtccctgtatctaactcaaatcaggaactgtattttttttaatgatttgcttttgaaacttgaagtcttgaaaacagtgtgatgcaattactgctgttctagcccccaaagagttttctgtgcaaaatcttgagaatcaatcaataaagaaagatggaaggaagggagaaattggaatgttttaactgcagccctcagaactttagtaacagcacaacaaattaaaaacaaaaacaactcatgccacagtatgtcgtcttcatgtgtcttgcaatgaactgtttcagtagccaatcctctttcttagtatatgaaaggacagggatttttgttcttgttgttctcgttgttgttttaagtttactggggaaagtgcatttggccaaatgaaatggtagtcaagcctattgcaacaaagttaggaagtttgttgtttgtttattataaacaaaaagcatgtgaaagtgcacttaagatagagtttttattaattacttacttattacctagattttaaatagacaatccaaagtctccccttcgtgttgccatcatcttgttgaatcagccattttatcgaggcacgtgatcagtgttgcaacataatgaaaaagatggctactgtgccttgtgttacttaatcatacagtaagctgacctggaaatgaatgaaactattactcctaagaattacattgtatagccccacagattaaatttaattaattaattcaaaacatgttaaacgttactttcatgtactatggaaaagtacaagtaggtttacattactgatttccagaagtaagtagtttcccctttcctagtcttctgtgtatgtgatgttgttaatttcttttattgcattataaaataaaaggattatgtatttttaactaaggtgagacattgatatatccttttgctacaagctatagctaatgtgctgagcttgtgccttggtgattgattgattgattgactgattgttttaactgattactgtagatcaacctgatgatttgtttgtttgaaattggcaggaaaaatgcagctttcaaatcattggggggagaaaaaggatgtctttcaggattattttaattaatttttttcataattgagacagaactgtttgttatgtaccataatgctaaataaaactgtggcacttttcaccataatttaatttagtggaaaaagaagacaatgctttccatattgtgataaggtaacatggggtttttctgggccagcctttagaacactgttagggtacatacgctaccttgatgaaagggaccttcgtgcaactgtagtcatcttaaaggcttctcatccactgtgcttcttaatgtgtaattaaagtgaggagaaattaaatactctgagggcgttttatataataaattcgtgaagaaatgtgtgctcttca

SEQ ID NO: 680 - DNA, 5070 bp, Homo sapiens
  source 1..5070: mol_type = genomic DNA
gctgcctgccgggatactcggcccgcccagccagtcctcccgtcttgcgccgcggccgcgagatccgtgtgtctcccaagatggtggcgctgggctcggggtgactacaggagacgacggggccttttcccttcgccaggacccgacacaccaggcttcgctcgctcgcgcacccctccgccgcgtagccatccgccagcgcgggcgcccgccatccgccgcctacttacgcttcacctctgccgacccggcgcgctcggctgcgggcggcggcgcctccttcggctcctcctcggaatagctcgcggcctgtagcccctggcaggagggcccctcagccccccggtgtggacaggcagcggcggctggcgacgaacgccgggatttcggcggccccggcgctccctttcccggcctcgttttccggataaggaagcgcgggtcccgcatgagccccggcggtggcggcagcgaaagagaacgaggcggtggcgggcggaggcggcgggcgagggcgactacgaccagtgaggcggccgccgcagcccaggcgcgggggcgacgacagatcaggagaacctcagtctgacgacattgaagctagccgaatgaagcgagcagctgcaaagcatctaatagaacgctactaccaccagttaactgagggctgtggaaatgaagcctgcacgaatgagttttgtgcttcctgtccaacttttcttcgtatggataataatgcagcagctattaaagccctcgagctttataagattaatgcaaaactctgtgatcctcatccctccaagaaaggagcaagctcagcttaccttgagaactcgaaaggtgcccccaacaactcctgctctgagataaaaatgaacaagaaaggcgctagaattgattttaaagatgtgacttacttaacagaagagaaggtatatgaaattcttgaattatgtagagaaagagaggattattcccctttaatccgtgttattggaagagttttttctagtgctgaggcattggtacagagcttccggaaagttaaacaacacaccaaggaagaactgaaatctcttcaagcaaaagatgaagacaaagatgaagatgaaaaggaaaaagctgcatgttctgctgctgctatggaagaagactcagaagcatcttcctcaaggataggtgatagctcacagggagacaacaatttgcaaaaattaggccctgatgatgtgtctgtggatattgatgccattagaagggtctacaccagattgctctctaatgaaaaaattgaaactgcctttctcaatgcacttgtatatttgtcacctaacgtggaatgtgacttgacgtatcacaatgtatactctcgagatcctaattatctgaatttgttcattatcgtaatggagaatagaaatctccacagtcctgaatatctggaaatggctttgccattattttgcaaagcgatgagcaagctaccccttgcagcccaaggaaaactgatcagactgtggtctaaatacaatgcagaccagattcggagaatgatggagacatttcagcaacttattacttataaagtcataagcaatgaatttaacagtcgaaatctagtgaatgatgatgatgccattgttgctgcttcgaagtgcttgaaaatggtttactatgcaaatgtagtgggaggggaagtggacacaaatcacaatgaagaagatgatgaagagcccatccctgagtccagcgagctgacacttcaggaacttttgggagaagaaagaagaaacaagaaaggtcctcgagtggaccccctggaaactgaacttggtgttaaaaccctggattgtcgaaaaccacttatcccttttgaagagtttattaatgaaccactgaatgaggttctagaaatggataaagattatacttttttcaaagtagaaacagagaacaaattctcttttatgacatgtccctttatattgaatgctgtcacaaagaatttgggattatattatgacaatagaattcgcatgtacagtgaacgaagaatcactgttctctacagcttagttcaaggacagcagttgaatccatatttgagactcaaagttagacgtgaccatatcatagatgatgcacttgtccggctagagatgatcgctatggaaaatcctgcagacttgaagaagcagttgtatgtggaatttgaaggagaacaaggagttgatgagggaggtgtttccaaagaattttttcagctggttgtggaggaaatcttcaatccagatattggtatgttcacatacgatgaatctacaaaattgttttggtttaatccatcttcttttgaaactgagggtcagtttactctgattggcatagtactgggtctggctatttacaataactgtatactggatgtacattttcccatggttgtctacaggaagctaatggggaaaaaaggaacttttcgtgacttgggagactctcacccagttctatatcagagtttaaaagatttattggagtatgaagggaatgtggaagatgacatgatgatcactttccagatatcacagacagatctttttggtaacccaatgatgtatgatctaaaggaaaatggtgataaaattccaattacaaatgaaaacaggaaggaatttgtcaatctttattctgactacattctcaataaatcagtagaaaaacagttcaaggcttttcggagaggttttcatatggtgaccaatgaatctcccttaaagtacttattcagaccagaagaaattgaattgcttatatgtggaagccggaatctagatttccaagcactagaagaaactacagaatatgacggtggctataccagggactctgttctgattagggagttctgggaaatcgttcattcatttacagatgaacagaaaagactcttcttgcagtttacaacgggcacagacagagcacctgtgggaggactaggaaaattaaagatgattatagccaaaaatggcccagacacagaaaggttacctacatctcatacttgctttaatgtgcttttacttccggaatactcaagcaaagaaaaacttaaagagagattgttgaaggccatcacgtatgccaaaggatttggcatgctgtaaaacaaaacaaaacaaaataaaacaaaaaaaaggaaggaaaaaaaaagaaaaaatttaaaaaattttaaaaatataacgagggataaatttttggtggtgatagtgtcccagtacaaaaaggctgtaagatagtcaaccacagtagtcacctatgtctgtgcctcccttctttattggggacatgtgggctggaacagcagatttcagctacatatatgaacaaatcctttattattattataattatttttttgcgtgaaagtgttacatattctttcacttgtatgtacagagaggtttttctgaatatttattttaagggttaaatcacttttgcttgtgtttattactgcttgaggttgagccttttgagtatttaaaaaatatataccaacagaactactctcccaaggaaaatattgccaccatttgtagaccacgtaaccttcaagtatgtgctacttttttgtccctgtatctaactcaaatcaggaactgtattttttttaatgatttgcttttgaaacttgaagtcttgaaaacagtgtgatgcaattactgctgttctagcccccaaagagttttctgtgcaaaatcttgagaatcaatcaataaagaaagatggaaggaagggagaaattggaatgttttaactgcagccctcagaactttagtaacagcacaacaaattaaaaacaaaaacaactcatgccacagtatgtcgtcttcatgtgtcttgcaatgaactgtttcagtagccaatcctctttcttagtatatgaaaggacagggatttttgttcttgttgttctcgttgttgttttaagtttactggggaaagtgcatttggccaaatgaaatggtagtcaagcctattgcaacaaagttaggaagtttgttgtttgtttattataaacaaaaagcatgtgaaagtgcacttaagatagagtttttattaattacttacttattacctagattttaaatagacaatccaaagtctccccttcgtgttgccatcatcttgttgaatcagccattttatcgaggcacgtgatcagtgttgcaacataatgaaaaagatggctactgtgccttgtgttacttaatcatacagtaagctgacctggaaatgaatgaaactattactcctaagaattacattgtatagccccacagattaaatttaattaattaattcaaaacatgttaaacgttactttcatgtactatggaaaagtacaagtaggtttacattactgatttccagaagtaagtagtttcccctttcctagtcttctgtgtatgtgatgttgttaatttcttttattgcattataaaataaaaggattatgtatttttaactaaggtgagacattgatatatccttttgctacaagctatagctaatgtgctgagcttgtgccttggtgattgattgattgattgactgattgttttaactgattactgtagatcaacctgatgatttgtttgtttgaaattggcaggaaaaatgcagctttcaaatcattggggggagaaaaaggatgtctttcaggattattttaattaatttttttcataattgagacagaactgtttgttatgtaccataatgctaaataaaactgtggcacttttcaccataatttaatttagtggaaaaagaagacaatgctttccatattgtgataaggtaacatggggtttttctgggccagcctttagaacactgttagggtacatacgctaccttgatgaaagggaccttcgtgcaactgtagtcatcttaaaggcttctcatccactgtgcttcttaatgtgtaattaaagtgaggagaaattaaatactctgagggcgttttatataataaattcgtgaagaaatgtgtgctcttca

SEQ ID NO: 681 - DNA, 5134 bp, Homo sapiens
  source 1..5134: mol_type = genomic DNA
gctgcctgccgggatactcggcccgcccagccagtcctcccgtcttgcgccgcggccgcgagatccgtgtgtctcccaagatggtggcgctgggctcggggtgactacaggagacgacggggccttttcccttcgccaggacccgacacaccaggcttcgctcgctcgcgcacccctccgccgcgtagccatccgccagcgcgggcgcccgccatccgccgcctacttacgcttcacctctgccgacccggcgcgctcggctgcgggcggcggcgcctccttcggctcctcctcggaatagctcgcggcctgtagcccctggcaggagggcccctcagccccccggtgtggacaggcagcggcggctggcgacgaacgccgggatttcggcggccccggcgctccctttcccggcctcgttttccggataaggaagcgcgggtcccgcatgagccccggcggtggcggcagcgaaagagaacgaggcggtggcgggcggaggcggcgggcgagggcgactacgaccagtgaggcggccgccgcagcccaggcgcgggggcgacgacaggttaaaaatctgtaagagcctgattttagaattcaccagctcctcagaagtttggcgaaatatgatcaggagaacctcagtctgacgacattgaagctagccgaatgaagcgagcagctgcaaagcatctaatagaacgctactaccaccagttaactgagggctgtggaaatgaagcctgcacgaatgagttttgtgcttcctgtccaacttttcttcgtatggataataatgcagcagctattaaagccctcgagctttataagattaatgcaaaactctgtgatcctcatccctccaagaaaggagcaagctcagcttaccttgagaactcgaaaggtgcccccaacaactcctgctctgagataaaaatgaacaagaaaggcgctagaattgattttaaagatgtgacttacttaacagaagagaaggtatatgaaattcttgaattatgtagagaaagagaggattattcccctttaatccgtgttattggaagagttttttctagtgctgaggcattggtacagagcttccggaaagttaaacaacacaccaaggaagaactgaaatctcttcaagcaaaagatgaagacaaagatgaagatgaaaaggaaaaagctgcatgttctgctgctgctatggaagaagactcagaagcatcttcctcaaggataggtgatagctcacagggagacaacaatttgcaaaaattaggccctgatgatgtgtctgtggatattgatgccattagaagggtctacaccagattgctctctaatgaaaaaattgaaactgcctttctcaatgcacttgtatatttgtcacctaacgtggaatgtgacttgacgtatcacaatgtatactctcgagatcctaattatctgaatttgttcattatcgtaatggagaatagaaatctccacagtcctgaatatctggaaatggctttgccattattttgcaaagcgatgagcaagctaccccttgcagcccaaggaaaactgatcagactgtggtctaaatacaatgcagaccagattcggagaatgatggagacatttcagcaacttattacttataaagtcataagcaatgaatttaacagtcgaaatctagtgaatgatgatgatgccattgttgctgcttcgaagtgcttgaaaatggtttactatgcaaatgtagtgggaggggaagtggacacaaatcacaatgaagaagatgatgaagagcccatccctgagtccagcgagctgacacttcaggaacttttgggagaagaaagaagaaacaagaaaggtcctcgagtggaccccctggaaactgaacttggtgttaaaaccctggattgtcgaaaaccacttatcccttttgaagagtttattaatgaaccactgaatgaggttctagaaatggataaagattatacttttttcaaagtagaaacagagaacaaattctcttttatgacatgtccctttatattgaatgctgtcacaaagaatttgggattatattatgacaatagaattcgcatgtacagtgaacgaagaatcactgttctctacagcttagttcaaggacagcagttgaatccatatttgagactcaaagttagacgtgaccatatcatagatgatgcacttgtccggctagagatgatcgctatggaaaatcctgcagacttgaagaagcagttgtatgtggaatttgaaggagaacaaggagttgatgagggaggtgtttccaaagaattttttcagctggttgtggaggaaatcttcaatccagatattggtatgttcacatacgatgaatctacaaaattgttttggtttaatccatcttcttttgaaactgagggtcagtttactctgattggcatagtactgggtctggctatttacaataactgtatactggatgtacattttcccatggttgtctacaggaagctaatggggaaaaaaggaacttttcgtgacttgggagactctcacccagttctatatcagagtttaaaagatttattggagtatgaagggaatgtggaagatgacatgatgatcactttccagatatcacagacagatctttttggtaacccaatgatgtatgatctaaaggaaaatggtgataaaattccaattacaaatgaaaacaggaaggaatttgtcaatctttattctgactacattctcaataaatcagtagaaaaacagttcaaggcttttcggagaggttttcatatggtgaccaatgaatctcccttaaagtacttattcagaccagaagaaattgaattgcttatatgtggaagccggaatctagatttccaagcactagaagaaactacagaatatgacggtggctataccagggactctgttctgattagggagttctgggaaatcgttcattcatttacagatgaacagaaaagactcttcttgcagtttacaacgggcacagacagagcacctgtgggaggactaggaaaattaaagatgattatagccaaaaatggcccagacacagaaaggttacctacatctcatacttgctttaatgtgcttttacttccggaatactcaagcaaagaaaaacttaaagagagattgttgaaggccatcacgtatgccaaaggatttggcatgctgtaaaacaaaacaaaacaaaataaaacaaaaaaaaggaaggaaaaaaaaagaaaaaatttaaaaaattttaaaaatataacgagggataaatttttggtggtgatagtgtcccagtacaaaaaggctgtaagatagtcaaccacagtagtcacctatgtctgtgcctcccttctttattggggacatgtgggctggaacagcagatttcagctacatatatgaacaaatcctttattattattataattatttttttgcgtgaaagtgttacatattctttcacttgtatgtacagagaggtttttctgaatatttattttaagggttaaatcacttttgcttgtgtttattactgcttgaggttgagccttttgagtatttaaaaaatatataccaacagaactactctcccaaggaaaatattgccaccatttgtagaccacgtaaccttcaagtatgtgctacttttttgtccctgtatctaactcaaatcaggaactgtattttttttaatgatttgcttttgaaacttgaagtcttgaaaacagtgtgatgcaattactgctgttctagcccccaaagagttttctgtgcaaaatcttgagaatcaatcaataaagaaagatggaaggaagggagaaattggaatgttttaactgcagccctcagaactttagtaacagcacaacaaattaaaaacaaaaacaactcatgccacagtatgtcgtcttcatgtgtcttgcaatgaactgtttcagtagccaatcctctttcttagtatatgaaaggacagggatttttgttcttgttgttctcgttgttgttttaagtttactggggaaagtgcatttggccaaatgaaatggtagtcaagcctattgcaacaaagttaggaagtttgttgtttgtttattataaacaaaaagcatgtgaaagtgcacttaagatagagtttttattaattacttacttattacctagattttaaatagacaatccaaagtctccccttcgtgttgccatcatcttgttgaatcagccattttatcgaggcacgtgatcagtgttgcaacataatgaaaaagatggctactgtgccttgtgttacttaatcatacagtaagctgacctggaaatgaatgaaactattactcctaagaattacattgtatagccccacagattaaatttaattaattaattcaaaacatgttaaacgttactttcatgtactatggaaaagtacaagtaggtttacattactgatttccagaagtaagtagtttcccctttcctagtcttctgtgtatgtgatgttgttaatttcttttattgcattataaaataaaaggattatgtatttttaactaaggtgagacattgatatatccttttgctacaagctatagctaatgtgctgagcttgtgccttggtgattgattgattgattgactgattgttttaactgattactgtagatcaacctgatgatttgtttgtttgaaattggcaggaaaaatgcagctttcaaatcattggggggagaaaaaggatgtctttcaggattattttaattaatttttttcataattgagacagaactgtttgttatgtaccataatgctaaataaaactgtggcacttttcaccataatttaatttagtggaaaaagaagacaatgctttccatattgtgataaggtaacatggggtttttctgggccagcctttagaacactgttagggtacatacgctaccttgatgaaagggaccttcgtgcaactgtagtcatcttaaaggcttctcatccactgtgcttcttaatgtgtaattaaagtgaggagaaattaaatactctgagggcgttttatataataaattcgtgaagaaatgtgtgctcttca

SEQ ID NO: 682 - DNA, 4003 bp, Homo sapiens
  source 1..4003: mol_type = genomic DNA
gctgcctgccgggatactcggcccgcccagccagtcctcccgtcttgcgccgcggccgcgagatccgtgtgtctcccaagatggtggcgctgggctcggggtgactacaggagacgacggggccttttcccttcgccaggacccgacacaccaggcttcgctcgctcgcgcacccctccgccgcgtagccatccgccagcgcgggcgcccgccatccgccgcctacttacgcttcacctctgccgacccggcgcgctcggctgcgggcggcggcgcctccttcggctcctcctcggaatagctcgcggcctgtagcccctggcaggagggcccctcagccccccggtgtggacaggcagcggcggctggcgacgaacgccgggatttcggcggccccggcgctccctttcccggcctcgttttccggataaggaagcgcgggtcccgcatgagccccggcggtggcggcagcgaaagagaacgaggcggtggcgggcggaggcggcgggcgagggcgactacgaccagtgaggcggccgccgcagcccaggcgcgggggcgacgacaggttaaaaatctgtaagagcctgattttagaattcaccagctcctcagaagtttggcgaaatatgagttattaagcctacgctcagatcaaggtagcagctagactggtgtgacaacctgtttttaatcagtgactcaaagctgtgatcaccctgatgtcaccgaatggccacagcttgtaaaagatcaggagaacctcagtctgacgacattgaagctagccgaatgaagcgagcagctgcaaagcatctaatagaacgctactaccaccagttaactgagggctgtggaaatgaagcctgcacgaatgagttttgtgcttcctgtccaacttttcttcgtatggataataatgcagcagctattaaagccctcgagctttataagattaatgcaaaactctgtgatcctcatccctccaagaaaggagcaagctcagcttaccttgagaactcgaaaggtgcccccaacaactcctgctctgagataaaaatgaacaagaaaggcgctagaattgattttaaagagatgatcgctatggaaaatcctgcagacttgaagaagcagttgtatgtggaatttgaaggagaacaaggagttgatgagggaggtgtttccaaagaattttttcagctggttgtggaggaaatcttcaatccagatattggtatgttcacatacgatgaatctacaaaattgttttggtttaatccatcttcttttgaaactgagggtcagtttactctgattggcatagtactgggtctggctatttacaataactgtatactggatgtacattttcccatggttgtctacaggaagctaatggggaaaaaaggaacttttcgtgacttgggagactctcacccagttctatatcagagtttaaaagatttattggagtatgaagggaatgtggaagatgacatgatgatcactttccagatatcacagacagatctttttggtaacccaatgatgtatgatctaaaggaaaatggtgataaaattccaattacaaatgaaaacaggaaggaatttgtcaatctttattctgactacattctcaataaatcagtagaaaaacagttcaaggcttttcggagaggttttcatatggtgaccaatgaatctcccttaaagtacttattcagaccagaagaaattgaattgcttatatgtggaagccggaatctagatttccaagcactagaagaaactacagaatatgacggtggctataccagggactctgttctgattagggagttctgggaaatcgttcattcatttacagatgaacagaaaagactcttcttgcagtttacaacgggcacagacagagcacctgtgggaggactaggaaaattaaagatgattatagccaaaaatggcccagacacagaaaggttacctacatctcatacttgctttaatgtgcttttacttccggaatactcaagcaaagaaaaacttaaagagagattgttgaaggccatcacgtatgccaaaggatttggcatgctgtaaaacaaaacaaaacaaaataaaacaaaaaaaaggaaggaaaaaaaaagaaaaaatttaaaaaattttaaaaatataacgagggataaatttttggtggtgatagtgtcccagtacaaaaaggctgtaagatagtcaaccacagtagtcacctatgtctgtgcctcccttctttattggggacatgtgggctggaacagcagatttcagctacatatatgaacaaatcctttattattattataattatttttttgcgtgaaagtgttacatattctttcacttgtatgtacagagaggtttttctgaatatttattttaagggttaaatcacttttgcttgtgtttattactgcttgaggttgagccttttgagtatttaaaaaatatataccaacagaactactctcccaaggaaaatattgccaccatttgtagaccacgtaaccttcaagtatgtgctacttttttgtccctgtatctaactcaaatcaggaactgtattttttttaatgatttgcttttgaaacttgaagtcttgaaaacagtgtgatgcaattactgctgttctagcccccaaagagttttctgtgcaaaatcttgagaatcaatcaataaagaaagatggaaggaagggagaaattggaatgttttaactgcagccctcagaactttagtaacagcacaacaaattaaaaacaaaaacaactcatgccacagtatgtcgtcttcatgtgtcttgcaatgaactgtttcagtagccaatcctctttcttagtatatgaaaggacagggatttttgttcttgttgttctcgttgttgttttaagtttactggggaaagtgcatttggccaaatgaaatggtagtcaagcctattgcaacaaagttaggaagtttgttgtttgtttattataaacaaaaagcatgtgaaagtgcacttaagatagagtttttattaattacttacttattacctagattttaaatagacaatccaaagtctccccttcgtgttgccatcatcttgttgaatcagccattttatcgaggcacgtgatcagtgttgcaacataatgaaaaagatggctactgtgccttgtgttacttaatcatacagtaagctgacctggaaatgaatgaaactattactcctaagaattacattgtatagccccacagattaaatttaattaattaattcaaaacatgttaaacgttactttcatgtactatggaaaagtacaagtaggtttacattactgatttccagaagtaagtagtttcccctttcctagtcttctgtgtatgtgatgttgttaatttcttttattgcattataaaataaaaggattatgtatttttaactaaggtgagacattgatatatccttttgctacaagctatagctaatgtgctgagcttgtgccttggtgattgattgattgattgactgattgttttaactgattactgtagatcaacctgatgatttgtttgtttgaaattggcaggaaaaatgcagctttcaaatcattggggggagaaaaaggatgtctttcaggattattttaattaatttttttcataattgagacagaactgtttgttatgtaccataatgctaaataaaactgtggcacttttcaccataatttaatttagtggaaaaagaagacaatgctttccatattgtgataaggtaacatggggtttttctgggccagcctttagaacactgttagggtacatacgctaccttgatgaaagggaccttcgtgcaactgtagtcatcttaaaggcttctcatccactgtgcttcttaatgtgtaattaaagtgaggagaaattaaatactctgagggcgttttatataataaattcgtgaagaaatgtgtgctcttca

SEQ ID NO: 683 - DNA, 5098 bp, Homo sapiens
  source 1..5098: mol_type = genomic DNA
gctgcctgccgggatactcggcccgcccagccagtcctcccgtcttgcgccgcggccgcgagatccgtgtgtctcccaagatggtggcgctgggctcggggtgactacaggagacgacggggccttttcccttcgccaggacccgacacaccaggcttcgctcgctcgcgcacccctccgccgcgtagccatccgccagcgcgggcgcccgccatccgccgcctacttacgcttcacctctgccgacccggcgcgctcggctgcgggcggcggcgcctccttcggctcctcctcggaatagctcgcggcctgtagcccctggcaggagggcccctcagccccccggtgtggacaggcagcggcggctggcgacgaacgccgggatttcggcggccccggcgctccctttcccggcctcgttttccggataaggaagcgcgggtcccgcatgagccccggcggtggcggcagcgaaagagaacgaggcggtggcgggcggaggcggcgggcgagggcgactacgaccagtgaggcggccgccgcagcccaggcgcgggggcgacgacaggttaaaaatctgtaagagcctgattttagaattcaccagctcctcagaagtttggcgaaatatgagttattaagcctacgctcagatcaaggtagcagctagactggtgtgacaacctgtttttaatcagtgactcaaagctgtgatcaccctgatgtcaccgaatggccacagcttgtaaaagatcaggagaacctcagtctgacgacattgaagctagccgaatgaagcgagcagctgcaaagcatctaatagaacgctactaccaccagttaactgagggctgtggaaatgaagcctgcacgaatgagttttgtgcttcctgtccaacttttcttcgtatggataataatgcagcagctattaaagccctcgagctttataagattaatgcaaaactctgtgatcctcatccctccaagaaaggagcaagctcagcttaccttgagaactcgaaaggtgcccccaacaactcctgctctgagataaaaatgaacaagaaaggcgctagaattgattttaaagatgtgacttacttaacagaagagaaggtatatgaaattcttgaattatgtagagaaagagaggattattcccctttaatccgtgttattggaagagttttttctagtgctgaggcattggtacagagcttccggaaagttaaacaacacaccaaggaagaactgaaatctcttcaagcaaaagatgaagacaaagatgaagatgaaaaggaaaaagctgcatgttctgctgctgctatggaagaagactcagaagcatcttcctcaaggataggtgatagctcacagggagacaacaatttgcaaaaattaggccctgatgatgtgtctgtggatattgatgccattagaagggtctacaccagattgctctctaatgaaaaaattgaaactgcctttctcaatgcacttgtatatttgtcacctaacgtggaatgtgacttgacgtatcacaatgtatactctcgagatcctaattatctgaatttgttcattatcgtaatggagaatagaaatctccacagtcctgaatatctggaaatggctttgccattattttgcaaagcgatgagcaagctaccccttgcagcccaaggaaaactgatcagactgtggtctaaatacaatgcagaccagattcggagaatgatggagacatttcagcaacttattacttataaagtcataagcaatgaatttaacagtcgaaatctagtgaatgatgatgatgccattgttgctgcttcgaagtgcttgaaaatggtttactatgcaaatgtagtgggaggggaagtggacacaaatcacaatgaagaagatgatgaagagcccatccctgagtccagcgagctgacacttcaggaacttttgggagaagaaagaagaaacaagaaaggtcctcgagtggaccccctggaaactgaacttggtgttaaaaccctggattgtcgaaaaccacttatcccttttgaagagtttattaatgaaccactgaatgaggttctagaaatggataaagattatacttttttcaaagtagaaacagagaacaaattctcttttatgacatgtccctttatattgaatgctgtcacaaagaatttgggattatattatgacaatagaattcgcatgtacagtgaacgaagaatcactgttctctacagcttagttcaaggacagcagttgaatccatatttgagactcaaagttagacgtgaccatatcatagatgatgcacttgtccggctagagatgatcgctatggaaaatcctgcagacttgaagaagcagttgtatgtggaatttgaaggagaacaaggagttgatgagggaggtgtttccaaagaattttttcagctggttgtggaggaaatcttcaatccagatattggtatgttcacatacgatgaatctacaaaattgttttggtttaatccatcttcttttgaaactgagggtcagtttactctgattggcatagtactgggtctggctatttacaataactgtatactggatgtacattttcccatggttgtctacaggaagctaatggggaaaaaaggaacttttcgtgacttgggagactctcacccagttctatatcagagtttaaaagatttattggagtatgaagggaatgtggaagatgacatgatgatcactttccagatatcacagacagatctttttggtaacccaatgatgtatgatctaaaggaaaatggtgataaaattccaattacaaatgaaaacaggaagaatctagatttccaagcactagaagaaactacagaatatgacggtggctataccagggactctgttctgattagggagttctgggaaatcgttcattcatttacagatgaacagaaaagactcttcttgcagtttacaacgggcacagacagagcacctgtgggaggactaggaaaattaaagatgattatagccaaaaatggcccagacacagaaaggttacctacatctcatacttgctttaatgtgcttttacttccggaatactcaagcaaagaaaaacttaaagagagattgttgaaggccatcacgtatgccaaaggatttggcatgctgtaaaacaaaacaaaacaaaataaaacaaaaaaaaggaaggaaaaaaaaagaaaaaatttaaaaaattttaaaaatataacgagggataaatttttggtggtgatagtgtcccagtacaaaaaggctgtaagatagtcaaccacagtagtcacctatgtctgtgcctcccttctttattggggacatgtgggctggaacagcagatttcagctacatatatgaacaaatcctttattattattataattatttttttgcgtgaaagtgttacatattctttcacttgtatgtacagagaggtttttctgaatatttattttaagggttaaatcacttttgcttgtgtttattactgcttgaggttgagccttttgagtatttaaaaaatatataccaacagaactactctcccaaggaaaatattgccaccatttgtagaccacgtaaccttcaagtatgtgctacttttttgtccctgtatctaactcaaatcaggaactgtattttttttaatgatttgcttttgaaacttgaagtcttgaaaacagtgtgatgcaattactgctgttctagcccccaaagagttttctgtgcaaaatcttgagaatcaatcaataaagaaagatggaaggaagggagaaattggaatgttttaactgcagccctcagaactttagtaacagcacaacaaattaaaaacaaaaacaactcatgccacagtatgtcgtcttcatgtgtcttgcaatgaactgtttcagtagccaatcctctttcttagtatatgaaaggacagggatttttgttcttgttgttctcgttgttgttttaagtttactggggaaagtgcatttggccaaatgaaatggtagtcaagcctattgcaacaaagttaggaagtttgttgtttgtttattataaacaaaaagcatgtgaaagtgcacttaagatagagtttttattaattacttacttattacctagattttaaatagacaatccaaagtctccccttcgtgttgccatcatcttgttgaatcagccattttatcgaggcacgtgatcagtgttgcaacataatgaaaaagatggctactgtgccttgtgttacttaatcatacagtaagctgacctggaaatgaatgaaactattactcctaagaattacattgtatagccccacagattaaatttaattaattaattcaaaacatgttaaacgttactttcatgtactatggaaaagtacaagtaggtttacattactgatttccagaagtaagtagtttcccctttcctagtcttctgtgtatgtgatgttgttaatttcttttattgcattataaaataaaaggattatgtatttttaactaaggtgagacattgatatatccttttgctacaagctatagctaatgtgctgagcttgtgccttggtgattgattgattgattgactgattgttttaactgattactgtagatcaacctgatgatttgtttgtttgaaattggcaggaaaaatgcagctttcaaatcattggggggagaaaaaggatgtctttcaggattattttaattaatttttttcataattgagacagaactgtttgttatgtaccataatgctaaataaaactgtggcacttttcaccataatttaatttagtggaaaaagaagacaatgctttccatattgtgataaggtaacatggggtttttctgggccagcctttagaacactgttagggtacatacgctaccttgatgaaagggaccttcgtgcaactgtagtcatcttaaaggcttctcatccactgtgcttcttaatgtgtaattaaagtgaggagaaattaaatactctgagggcgttttatataataaattcgtgaagaaatgtgtgctcttca

SEQ ID NO: 684 - DNA, 5254 bp, Homo sapiens
  source 1..5254: mol_type = genomic DNA
gctgcctgccgggatactcggcccgcccagccagtcctcccgtcttgcgccgcggccgcgagatccgtgtgtctcccaagatggtggcgctgggctcggggtgactacaggagacgacggggccttttcccttcgccaggacccgacacaccaggcttcgctcgctcgcgcacccctccgccgcgtagccatccgccagcgcgggcgcccgccatccgccgcctacttacgcttcacctctgccgacccggcgcgctcggctgcgggcggcggcgcctccttcggctcctcctcggaatagctcgcggcctgtagcccctggcaggagggcccctcagccccccggtgtggacaggcagcggcggctggcgacgaacgccgggatttcggcggccccggcgctccctttcccggcctcgttttccggataaggaagcgcgggtcccgcatgagccccggcggtggcggcagcgaaagagaacgaggcggtggcgggcggaggcggcgggcgagggcgactacgaccagtgaggcggccgccgcagcccaggcgcgggggcgacgacaggttaaaaatctgtaagagcctgattttagaattcaccagctcctcagaagtttggcgaaatatgagttattaagcctacgctcagatcaaggtagcagctagactggtgtgacaacctgtttttaatcagtgactcaaagctgtgatcaccctgatgtcaccgaatggccacagcttgtaaaagatcaggagaacctcagtctgacgacattgaagctagccgaatgaagcgagcagctgcaaagcatctaatagaacgctactaccaccagttaactgagggctgtggaaatgaagcctgcacgaatgagttttgtgcttcctgtccaacttttcttcgtatggataataatgcagcagctattaaagccctcgagctttataagattaatgcaaaactctgtgatcctcatccctccaagaaaggagcaagctcagcttaccttgagaactcgaaaggtgcccccaacaactcctgctctgagataaaaatgaacaagaaaggcgctagaattgattttaaagatgtgacttacttaacagaagagaaggtatatgaaattcttgaattatgtagagaaagagaggattattcccctttaatccgtgttattggaagagttttttctagtgctgaggcattggtacagagcttccggaaagttaaacaacacaccaaggaagaactgaaatctcttcaagcaaaagatgaagacaaagatgaagatgaaaaggaaaaagctgcatgttctgctgctgctatggaagaagactcagaagcatcttcctcaaggataggtgatagctcacagggagacaacaatttgcaaaaattaggccctgatgatgtgtctgtggatattgatgccattagaagggtctacaccagattgctctctaatgaaaaaattgaaactgcctttctcaatgcacttgtatatttgtcacctaacgtggaatgtgacttgacgtatcacaatgtatactctcgagatcctaattatctgaatttgttcattatcgtaatggagaatagaaatctccacagtcctgaatatctggaaatggctttgccattattttgcaaagcgatgagcaagctaccccttgcagcccaaggaaaactgatcagactgtggtctaaatacaatgcagaccagattcggagaatgatggagacatttcagcaacttattacttataaagtcataagcaatgaatttaacagtcgaaatctagtgaatgatgatgatgccattgttgctgcttcgaagtgcttgaaaatggtttactatgcaaatgtagtgggaggggaagtggacacaaatcacaatgaagaagatgatgaagagcccatccctgagtccagcgagctgacacttcaggaacttttgggagaagaaagaagaaacaagaaaggtcctcgagtggaccccctggaaactgaacttggtgttaaaaccctggattgtcgaaaaccacttatcccttttgaagagtttattaatgaaccactgaatgaggttctagaaatggataaagattatacttttttcaaagtagaaacagagaacaaattctcttttatgacatgtccctttatattgaatgctgtcacaaagaatttgggattatattatgacaatagaattcgcatgtacagtgaacgaagaatcactgttctctacagcttagttcaaggacagcagttgaatccatatttgagactcaaagttagacgtgaccatatcatagatgatgcacttgtccggctagagatgatcgctatggaaaatcctgcagacttgaagaagcagttgtatgtggaatttgaaggagaacaaggagttgatgagggaggtgtttccaaagaattttttcagctggttgtggaggaaatcttcaatccagatattggtatgttcacatacgatgaatctacaaaattgttttggtttaatccatcttcttttgaaactgagggtcagtttactctgattggcatagtactgggtctggctatttacaataactgtatactggatgtacattttcccatggttgtctacaggaagctaatggggaaaaaaggaacttttcgtgacttgggagactctcacccagttctatatcagagtttaaaagatttattggagtatgaagggaatgtggaagatgacatgatgatcactttccagatatcacagacagatctttttggtaacccaatgatgtatgatctaaaggaaaatggtgataaaattccaattacaaatgaaaacaggaaggaatttgtcaatctttattctgactacattctcaataaatcagtagaaaaacagttcaaggcttttcggagaggttttcatatggtgaccaatgaatctcccttaaagtacttattcagaccagaagaaattgaattgcttatatgtggaagccggaatctagatttccaagcactagaagaaactacagaatatgacggtggctataccagggactctgttctgattagggagttctgggaaatcgttcattcatttacagatgaacagaaaagactcttcttgcagtttacaacgggcacagacagagcacctgtgggaggactaggaaaattaaagatgattatagccaaaaatggcccagacacagaaaggttacctacatctcatacttgctttaatgtgcttttacttccggaatactcaagcaaagaaaaacttaaagagagattgttgaaggccatcacgtatgccaaaggatttggcatgctgtaaaacaaaacaaaacaaaataaaacaaaaaaaaggaaggaaaaaaaaagaaaaaatttaaaaaattttaaaaatataacgagggataaatttttggtggtgatagtgtcccagtacaaaaaggctgtaagatagtcaaccacagtagtcacctatgtctgtgcctcccttctttattggggacatgtgggctggaacagcagatttcagctacatatatgaacaaatcctttattattattataattatttttttgcgtgaaagtgttacatattctttcacttgtatgtacagagaggtttttctgaatatttattttaagggttaaatcacttttgcttgtgtttattactgcttgaggttgagccttttgagtatttaaaaaatatataccaacagaactactctcccaaggaaaatattgccaccatttgtagaccacgtaaccttcaagtatgtgctacttttttgtccctgtatctaactcaaatcaggaactgtattttttttaatgatttgcttttgaaacttgaagtcttgaaaacagtgtgatgcaattactgctgttctagcccccaaagagttttctgtgcaaaatcttgagaatcaatcaataaagaaagatggaaggaagggagaaattggaatgttttaactgcagccctcagaactttagtaacagcacaacaaattaaaaacaaaaacaactcatgccacagtatgtcgtcttcatgtgtcttgcaatgaactgtttcagtagccaatcctctttcttagtatatgaaaggacagggatttttgttcttgttgttctcgttgttgttttaagtttactggggaaagtgcatttggccaaatgaaatggtagtcaagcctattgcaacaaagttaggaagtttgttgtttgtttattataaacaaaaagcatgtgaaagtgcacttaagatagagtttttattaattacttacttattacctagattttaaatagacaatccaaagtctccccttcgtgttgccatcatcttgttgaatcagccattttatcgaggcacgtgatcagtgttgcaacataatgaaaaagatggctactgtgccttgtgttacttaatcatacagtaagctgacctggaaatgaatgaaactattactcctaagaattacattgtatagccccacagattaaatttaattaattaattcaaaacatgttaaacgttactttcatgtactatggaaaagtacaagtaggtttacattactgatttccagaagtaagtagtttcccctttcctagtcttctgtgtatgtgatgttgttaatttcttttattgcattataaaataaaaggattatgtatttttaactaaggtgagacattgatatatccttttgctacaagctatagctaatgtgctgagcttgtgccttggtgattgattgattgattgactgattgttttaactgattactgtagatcaacctgatgatttgtttgtttgaaattggcaggaaaaatgcagctttcaaatcattggggggagaaaaaggatgtctttcaggattattttaattaatttttttcataattgagacagaactgtttgttatgtaccataatgctaaataaaactgtggcacttttcaccataatttaatttagtggaaaaagaagacaatgctttccatattgtgataaggtaacatggggtttttctgggccagcctttagaacactgttagggtacatacgctaccttgatgaaagggaccttcgtgcaactgtagtcatcttaaaggcttctcatccactgtgcttcttaatgtgtaattaaagtgaggagaaattaaatactctgagggcgttttatataataaattcgtgaagaaatgtgtgctcttca

SEQ ID NO: 685 - DNA, 5367 bp, Homo sapiens
  source 1..5367: mol_type = genomic DNA
gctgcctgccgggatactcggcccgcccagccagtcctcccgtcttgcgccgcggccgcgagatccgtgtgtctcccaagatggtggcgctgggctcggggtgactacaggagacgacggggccttttcccttcgccaggacccgacacaccaggcttcgctcgctcgcgcacccctccgccgcgtagccatccgccagcgcgggcgcccgccatccgccgcctacttacgcttcacctctgccgacccggcgcgctcggctgcgggcggcggcgcctccttcggctcctcctcggaatagctcgcggcctgtagcccctggcaggagggcccctcagccccccggtgtggacaggcagcggcggctggcgacgaacgccgggatttcggcggccccggcgctccctttcccggcctcgttttccggataaggaagcgcgggtcccgcatgagccccggcggtggcggcagcgaaagagaacgaggcggtggcgggcggaggcggcgggcgagggcgactacgaccagtgaggcggccgccgcagcccaggcgcgggggcgacgacaggttaaaaatctgtaagagcctgattttagaattcaccagctcctcagaagtttggcgaaatatgagttattaagcctacgctcagatcaaggtagcagctagactggtgtgacaacctgtttttaatcagtgactcaaagctgtgatcaccctgatgtcaccgaatggccacagcttgtaaaagatcaggagaacctcagtctgacgacattgaagctagccgaatacacaggagcccatgaaaggcatcacgtgtggaaggaagtgacacgagtcatagtctgccctgcttttctaccacctgaagcatcatataaacctatatcttctgtttcaaatgaagcgagcagctgcaaagcatctaatagaacgctactaccaccagttaactgagggctgtggaaatgaagcctgcacgaatgagttttgtgcttcctgtccaacttttcttcgtatggataataatgcagcagctattaaagccctcgagctttataagattaatgcaaaactctgtgatcctcatccctccaagaaaggagcaagctcagcttaccttgagaactcgaaaggtgcccccaacaactcctgctctgagataaaaatgaacaagaaaggcgctagaattgattttaaagatgtgacttacttaacagaagagaaggtatatgaaattcttgaattatgtagagaaagagaggattattcccctttaatccgtgttattggaagagttttttctagtgctgaggcattggtacagagcttccggaaagttaaacaacacaccaaggaagaactgaaatctcttcaagcaaaagatgaagacaaagatgaagatgaaaaggaaaaagctgcatgttctgctgctgctatggaagaagactcagaagcatcttcctcaaggataggtgatagctcacagggagacaacaatttgcaaaaattaggccctgatgatgtgtctgtggatattgatgccattagaagggtctacaccagattgctctctaatgaaaaaattgaaactgcctttctcaatgcacttgtatatttgtcacctaacgtggaatgtgacttgacgtatcacaatgtatactctcgagatcctaattatctgaatttgttcattatcgtaatggagaatagaaatctccacagtcctgaatatctggaaatggctttgccattattttgcaaagcgatgagcaagctaccccttgcagcccaaggaaaactgatcagactgtggtctaaatacaatgcagaccagattcggagaatgatggagacatttcagcaacttattacttataaagtcataagcaatgaatttaacagtcgaaatctagtgaatgatgatgatgccattgttgctgcttcgaagtgcttgaaaatggtttactatgcaaatgtagtgggaggggaagtggacacaaatcacaatgaagaagatgatgaagagcccatccctgagtccagcgagctgacacttcaggaacttttgggagaagaaagaagaaacaagaaaggtcctcgagtggaccccctggaaactgaacttggtgttaaaaccctggattgtcgaaaaccacttatcccttttgaagagtttattaatgaaccactgaatgaggttctagaaatggataaagattatacttttttcaaagtagaaacagagaacaaattctcttttatgacatgtccctttatattgaatgctgtcacaaagaatttgggattatattatgacaatagaattcgcatgtacagtgaacgaagaatcactgttctctacagcttagttcaaggacagcagttgaatccatatttgagactcaaagttagacgtgaccatatcatagatgatgcacttgtccggctagagatgatcgctatggaaaatcctgcagacttgaagaagcagttgtatgtggaatttgaaggagaacaaggagttgatgagggaggtgtttccaaagaattttttcagctggttgtggaggaaatcttcaatccagatattggtatgttcacatacgatgaatctacaaaattgttttggtttaatccatcttcttttgaaactgagggtcagtttactctgattggcatagtactgggtctggctatttacaataactgtatactggatgtacattttcccatggttgtctacaggaagctaatggggaaaaaaggaacttttcgtgacttgggagactctcacccagttctatatcagagtttaaaagatttattggagtatgaagggaatgtggaagatgacatgatgatcactttccagatatcacagacagatctttttggtaacccaatgatgtatgatctaaaggaaaatggtgataaaattccaattacaaatgaaaacaggaaggaatttgtcaatctttattctgactacattctcaataaatcagtagaaaaacagttcaaggcttttcggagaggttttcatatggtgaccaatgaatctcccttaaagtacttattcagaccagaagaaattgaattgcttatatgtggaagccggaatctagatttccaagcactagaagaaactacagaatatgacggtggctataccagggactctgttctgattagggagttctgggaaatcgttcattcatttacagatgaacagaaaagactcttcttgcagtttacaacgggcacagacagagcacctgtgggaggactaggaaaattaaagatgattatagccaaaaatggcccagacacagaaaggttacctacatctcatacttgctttaatgtgcttttacttccggaatactcaagcaaagaaaaacttaaagagagattgttgaaggccatcacgtatgccaaaggatttggcatgctgtaaaacaaaacaaaacaaaataaaacaaaaaaaaggaaggaaaaaaaaagaaaaaatttaaaaaattttaaaaatataacgagggataaatttttggtggtgatagtgtcccagtacaaaaaggctgtaagatagtcaaccacagtagtcacctatgtctgtgcctcccttctttattggggacatgtgggctggaacagcagatttcagctacatatatgaacaaatcctttattattattataattatttttttgcgtgaaagtgttacatattctttcacttgtatgtacagagaggtttttctgaatatttattttaagggttaaatcacttttgcttgtgtttattactgcttgaggttgagccttttgagtatttaaaaaatatataccaacagaactactctcccaaggaaaatattgccaccatttgtagaccacgtaaccttcaagtatgtgctacttttttgtccctgtatctaactcaaatcaggaactgtattttttttaatgatttgcttttgaaacttgaagtcttgaaaacagtgtgatgcaattactgctgttctagcccccaaagagttttctgtgcaaaatcttgagaatcaatcaataaagaaagatggaaggaagggagaaattggaatgttttaactgcagccctcagaactttagtaacagcacaacaaattaaaaacaaaaacaactcatgccacagtatgtcgtcttcatgtgtcttgcaatgaactgtttcagtagccaatcctctttcttagtatatgaaaggacagggatttttgttcttgttgttctcgttgttgttttaagtttactggggaaagtgcatttggccaaatgaaatggtagtcaagcctattgcaacaaagttaggaagtttgttgtttgtttattataaacaaaaagcatgtgaaagtgcacttaagatagagtttttattaattacttacttattacctagattttaaatagacaatccaaagtctccccttcgtgttgccatcatcttgttgaatcagccattttatcgaggcacgtgatcagtgttgcaacataatgaaaaagatggctactgtgccttgtgttacttaatcatacagtaagctgacctggaaatgaatgaaactattactcctaagaattacattgtatagccccacagattaaatttaattaattaattcaaaacatgttaaacgttactttcatgtactatggaaaagtacaagtaggtttacattactgatttccagaagtaagtagtttcccctttcctagtcttctgtgtatgtgatgttgttaatttcttttattgcattataaaataaaaggattatgtatttttaactaaggtgagacattgatatatccttttgctacaagctatagctaatgtgctgagcttgtgccttggtgattgattgattgattgactgattgttttaactgattactgtagatcaacctgatgatttgtttgtttgaaattggcaggaaaaatgcagctttcaaatcattggggggagaaaaaggatgtctttcaggattattttaattaatttttttcataattgagacagaactgtttgttatgtaccataatgctaaataaaactgtggcacttttcaccataatttaatttagtggaaaaagaagacaatgctttccatattgtgataaggtaacatggggtttttctgggccagcctttagaacactgttagggtacatacgctaccttgatgaaagggaccttcgtgcaactgtagtcatcttaaaggcttctcatccactgtgcttcttaatgtgtaattaaagtgaggagaaattaaatactctgagggcgttttatataataaattcgtgaagaaatgtgtgctcttca

SEQ ID NO: 686 - DNA, 5325 bp, Homo sapiens
  source 1..5325: mol_type = genomic DNA
gctgcctgccgggatactcggcccgcccagccagtcctcccgtcttgcgccgcggccgcgagatccgtgtgtctcccaagatggtggcgctgggctcggggtgactacaggagacgacggggccttttcccttcgccaggacccgacacaccaggcttcgctcgctcgcgcacccctccgccgcgtagccatccgccagcgcgggcgcccgccatccgccgcctacttacgcttcacctctgccgacccggcgcgctcggctgcgggcggcggcgcctccttcggctcctcctcggaatagctcgcggcctgtagcccctggcaggagggcccctcagccccccggtgtggacaggcagcggcggctggcgacgaacgccgggatttcggcggccccggcgctccctttcccggcctcgttttccggataaggaagcgcgggtcccgcatgagccccggcggtggcggcagcgaaagagaacgaggcggtggcgggcggaggcggcgggcgagggcgactacgaccagtgaggcggccgccgcagcccaggcgcgggggcgacgacaggttaaaaatctgtaagagcctgattttagaattcaccagctcctcagaagtttggcgaaatatgagttattaagcctacgctcagatcaaggtagcagctagactggtgtgacaacctgtttttaatcagtgactcaaagctgtgatcaccctgatgtcaccgaatggccacagcttgtaaaagctcttctgtctgggagatacaagtttggaagcaatcttggggtacttacccacaaggctggtggagaccagatcaggagaacctcagtctgacgacattgaagctagccgaatgaagcgagcagctgcaaagcatctaatagaacgctactaccaccagttaactgagggctgtggaaatgaagcctgcacgaatgagttttgtgcttcctgtccaacttttcttcgtatggataataatgcagcagctattaaagccctcgagctttataagattaatgcaaaactctgtgatcctcatccctccaagaaaggagcaagctcagcttaccttgagaactcgaaaggtgcccccaacaactcctgctctgagataaaaatgaacaagaaaggcgctagaattgattttaaagatgtgacttacttaacagaagagaaggtatatgaaattcttgaattatgtagagaaagagaggattattcccctttaatccgtgttattggaagagttttttctagtgctgaggcattggtacagagcttccggaaagttaaacaacacaccaaggaagaactgaaatctcttcaagcaaaagatgaagacaaagatgaagatgaaaaggaaaaagctgcatgttctgctgctgctatggaagaagactcagaagcatcttcctcaaggataggtgatagctcacagggagacaacaatttgcaaaaattaggccctgatgatgtgtctgtggatattgatgccattagaagggtctacaccagattgctctctaatgaaaaaattgaaactgcctttctcaatgcacttgtatatttgtcacctaacgtggaatgtgacttgacgtatcacaatgtatactctcgagatcctaattatctgaatttgttcattatcgtaatggagaatagaaatctccacagtcctgaatatctggaaatggctttgccattattttgcaaagcgatgagcaagctaccccttgcagcccaaggaaaactgatcagactgtggtctaaatacaatgcagaccagattcggagaatgatggagacatttcagcaacttattacttataaagtcataagcaatgaatttaacagtcgaaatctagtgaatgatgatgatgccattgttgctgcttcgaagtgcttgaaaatggtttactatgcaaatgtagtgggaggggaagtggacacaaatcacaatgaagaagatgatgaagagcccatccctgagtccagcgagctgacacttcaggaacttttgggagaagaaagaagaaacaagaaaggtcctcgagtggaccccctggaaactgaacttggtgttaaaaccctggattgtcgaaaaccacttatcccttttgaagagtttattaatgaaccactgaatgaggttctagaaatggataaagattatacttttttcaaagtagaaacagagaacaaattctcttttatgacatgtccctttatattgaatgctgtcacaaagaatttgggattatattatgacaatagaattcgcatgtacagtgaacgaagaatcactgttctctacagcttagttcaaggacagcagttgaatccatatttgagactcaaagttagacgtgaccatatcatagatgatgcacttgtccggctagagatgatcgctatggaaaatcctgcagacttgaagaagcagttgtatgtggaatttgaaggagaacaaggagttgatgagggaggtgtttccaaagaattttttcagctggttgtggaggaaatcttcaatccagatattggtatgttcacatacgatgaatctacaaaattgttttggtttaatccatcttcttttgaaactgagggtcagtttactctgattggcatagtactgggtctggctatttacaataactgtatactggatgtacattttcccatggttgtctacaggaagctaatggggaaaaaaggaacttttcgtgacttgggagactctcacccagttctatatcagagtttaaaagatttattggagtatgaagggaatgtggaagatgacatgatgatcactttccagatatcacagacagatctttttggtaacccaatgatgtatgatctaaaggaaaatggtgataaaattccaattacaaatgaaaacaggaaggaatttgtcaatctttattctgactacattctcaataaatcagtagaaaaacagttcaaggcttttcggagaggttttcatatggtgaccaatgaatctcccttaaagtacttattcagaccagaagaaattgaattgcttatatgtggaagccggaatctagatttccaagcactagaagaaactacagaatatgacggtggctataccagggactctgttctgattagggagttctgggaaatcgttcattcatttacagatgaacagaaaagactcttcttgcagtttacaacgggcacagacagagcacctgtgggaggactaggaaaattaaagatgattatagccaaaaatggcccagacacagaaaggttacctacatctcatacttgctttaatgtgcttttacttccggaatactcaagcaaagaaaaacttaaagagagattgttgaaggccatcacgtatgccaaaggatttggcatgctgtaaaacaaaacaaaacaaaataaaacaaaaaaaaggaaggaaaaaaaaagaaaaaatttaaaaaattttaaaaatataacgagggataaatttttggtggtgatagtgtcccagtacaaaaaggctgtaagatagtcaaccacagtagtcacctatgtctgtgcctcccttctttattggggacatgtgggctggaacagcagatttcagctacatatatgaacaaatcctttattattattataattatttttttgcgtgaaagtgttacatattctttcacttgtatgtacagagaggtttttctgaatatttattttaagggttaaatcacttttgcttgtgtttattactgcttgaggttgagccttttgagtatttaaaaaatatataccaacagaactactctcccaaggaaaatattgccaccatttgtagaccacgtaaccttcaagtatgtgctacttttttgtccctgtatctaactcaaatcaggaactgtattttttttaatgatttgcttttgaaacttgaagtcttgaaaacagtgtgatgcaattactgctgttctagcccccaaagagttttctgtgcaaaatcttgagaatcaatcaataaagaaagatggaaggaagggagaaattggaatgttttaactgcagccctcagaactttagtaacagcacaacaaattaaaaacaaaaacaactcatgccacagtatgtcgtcttcatgtgtcttgcaatgaactgtttcagtagccaatcctctttcttagtatatgaaaggacagggatttttgttcttgttgttctcgttgttgttttaagtttactggggaaagtgcatttggccaaatgaaatggtagtcaagcctattgcaacaaagttaggaagtttgttgtttgtttattataaacaaaaagcatgtgaaagtgcacttaagatagagtttttattaattacttacttattacctagattttaaatagacaatccaaagtctccccttcgtgttgccatcatcttgttgaatcagccattttatcgaggcacgtgatcagtgttgcaacataatgaaaaagatggctactgtgccttgtgttacttaatcatacagtaagctgacctggaaatgaatgaaactattactcctaagaattacattgtatagccccacagattaaatttaattaattaattcaaaacatgttaaacgttactttcatgtactatggaaaagtacaagtaggtttacattactgatttccagaagtaagtagtttcccctttcctagtcttctgtgtatgtgatgttgttaatttcttttattgcattataaaataaaaggattatgtatttttaactaaggtgagacattgatatatccttttgctacaagctatagctaatgtgctgagcttgtgccttggtgattgattgattgattgactgattgttttaactgattactgtagatcaacctgatgatttgtttgtttgaaattggcaggaaaaatgcagctttcaaatcattggggggagaaaaaggatgtctttcaggattattttaattaatttttttcataattgagacagaactgtttgttatgtaccataatgctaaataaaactgtggcacttttcaccataatttaatttagtggaaaaagaagacaatgctttccatattgtgataaggtaacatggggtttttctgggccagcctttagaacactgttagggtacatacgctaccttgatgaaagggaccttcgtgcaactgtagtcatcttaaaggcttctcatccactgtgcttcttaatgtgtaattaaagtgaggagaaattaaatactctgagggcgttttatataataaattcgtgaagaaatgtgtgctcttca

SEQ ID NO: 687 - DNA, 5400 bp, Homo sapiens
  source 1..5400: mol_type = genomic DNA
gctgcctgccgggatactcggcccgcccagccagtcctcccgtcttgcgccgcggccgcgagatccgtgtgtctcccaagatggtggcgctgggctcggggtgactacaggagacgacggggccttttcccttcgccaggacccgacacaccaggcttcgctcgctcgcgcacccctccgccgcgtagccatccgccagcgcgggcgcccgccatccgccgcctacttacgcttcacctctgccgacccggcgcgctcggctgcgggcggcggcgcctccttcggctcctcctcggaatagctcgcggcctgtagcccctggcaggagggcccctcagccccccggtgtggacaggcagcggcggctggcgacgaacgccgggatttcggcggccccggcgctccctttcccggcctcgttttccggataaggaagcgcgggtcccgcatgagccccggcggtggcggcagcgaaagagaacgaggcggtggcgggcggaggcggcgggcgagggcgactacgaccagtgaggcggccgccgcagcccaggcgcgggggcgacgacaggttaaaaatctgtaagagcctgattttagaattcaccagctcctcagaagtttggcgaaatatgagttattaagcctacgctcagatcaaggtagcagctagactggtgtgacaacctgtttttaatcagtgactcaaagctgtgatcaccctgatgtcaccgaatggccacagcttgtaaaagtatgacatctgatgctggagggtcgcactttcaaaaatgagtcagctggtacatggggttatcatcaatttttagctcttctgtctgggagatacaagtttggaagcaatcttggggtacttacccacaaggctggtggagaccagatcaggagaacctcagtctgacgacattgaagctagccgaatgaagcgagcagctgcaaagcatctaatagaacgctactaccaccagttaactgagggctgtggaaatgaagcctgcacgaatgagttttgtgcttcctgtccaacttttcttcgtatggataataatgcagcagctattaaagccctcgagctttataagattaatgcaaaactctgtgatcctcatccctccaagaaaggagcaagctcagcttaccttgagaactcgaaaggtgcccccaacaactcctgctctgagataaaaatgaacaagaaaggcgctagaattgattttaaagatgtgacttacttaacagaagagaaggtatatgaaattcttgaattatgtagagaaagagaggattattcccctttaatccgtgttattggaagagttttttctagtgctgaggcattggtacagagcttccggaaagttaaacaacacaccaaggaagaactgaaatctcttcaagcaaaagatgaagacaaagatgaagatgaaaaggaaaaagctgcatgttctgctgctgctatggaagaagactcagaagcatcttcctcaaggataggtgatagctcacagggagacaacaatttgcaaaaattaggccctgatgatgtgtctgtggatattgatgccattagaagggtctacaccagattgctctctaatgaaaaaattgaaactgcctttctcaatgcacttgtatatttgtcacctaacgtggaatgtgacttgacgtatcacaatgtatactctcgagatcctaattatctgaatttgttcattatcgtaatggagaatagaaatctccacagtcctgaatatctggaaatggctttgccattattttgcaaagcgatgagcaagctaccccttgcagcccaaggaaaactgatcagactgtggtctaaatacaatgcagaccagattcggagaatgatggagacatttcagcaacttattacttataaagtcataagcaatgaatttaacagtcgaaatctagtgaatgatgatgatgccattgttgctgcttcgaagtgcttgaaaatggtttactatgcaaatgtagtgggaggggaagtggacacaaatcacaatgaagaagatgatgaagagcccatccctgagtccagcgagctgacacttcaggaacttttgggagaagaaagaagaaacaagaaaggtcctcgagtggaccccctggaaactgaacttggtgttaaaaccctggattgtcgaaaaccacttatcccttttgaagagtttattaatgaaccactgaatgaggttctagaaatggataaagattatacttttttcaaagtagaaacagagaacaaattctcttttatgacatgtccctttatattgaatgctgtcacaaagaatttgggattatattatgacaatagaattcgcatgtacagtgaacgaagaatcactgttctctacagcttagttcaaggacagcagttgaatccatatttgagactcaaagttagacgtgaccatatcatagatgatgcacttgtccggctagagatgatcgctatggaaaatcctgcagacttgaagaagcagttgtatgtggaatttgaaggagaacaaggagttgatgagggaggtgtttccaaagaattttttcagctggttgtggaggaaatcttcaatccagatattggtatgttcacatacgatgaatctacaaaattgttttggtttaatccatcttcttttgaaactgagggtcagtttactctgattggcatagtactgggtctggctatttacaataactgtatactggatgtacattttcccatggttgtctacaggaagctaatggggaaaaaaggaacttttcgtgacttgggagactctcacccagttctatatcagagtttaaaagatttattggagtatgaagggaatgtggaagatgacatgatgatcactttccagatatcacagacagatctttttggtaacccaatgatgtatgatctaaaggaaaatggtgataaaattccaattacaaatgaaaacaggaaggaatttgtcaatctttattctgactacattctcaataaatcagtagaaaaacagttcaaggcttttcggagaggttttcatatggtgaccaatgaatctcccttaaagtacttattcagaccagaagaaattgaattgcttatatgtggaagccggaatctagatttccaagcactagaagaaactacagaatatgacggtggctataccagggactctgttctgattagggagttctgggaaatcgttcattcatttacagatgaacagaaaagactcttcttgcagtttacaacgggcacagacagagcacctgtgggaggactaggaaaattaaagatgattatagccaaaaatggcccagacacagaaaggttacctacatctcatacttgctttaatgtgcttttacttccggaatactcaagcaaagaaaaacttaaagagagattgttgaaggccatcacgtatgccaaaggatttggcatgctgtaaaacaaaacaaaacaaaataaaacaaaaaaaaggaaggaaaaaaaaagaaaaaatttaaaaaattttaaaaatataacgagggataaatttttggtggtgatagtgtcccagtacaaaaaggctgtaagatagtcaaccacagtagtcacctatgtctgtgcctcccttctttattggggacatgtgggctggaacagcagatttcagctacatatatgaacaaatcctttattattattataattatttttttgcgtgaaagtgttacatattctttcacttgtatgtacagagaggtttttctgaatatttattttaagggttaaatcacttttgcttgtgtttattactgcttgaggttgagccttttgagtatttaaaaaatatataccaacagaactactctcccaaggaaaatattgccaccatttgtagaccacgtaaccttcaagtatgtgctacttttttgtccctgtatctaactcaaatcaggaactgtattttttttaatgatttgcttttgaaacttgaagtcttgaaaacagtgtgatgcaattactgctgttctagcccccaaagagttttctgtgcaaaatcttgagaatcaatcaataaagaaagatggaaggaagggagaaattggaatgttttaactgcagccctcagaactttagtaacagcacaacaaattaaaaacaaaaacaactcatgccacagtatgtcgtcttcatgtgtcttgcaatgaactgtttcagtagccaatcctctttcttagtatatgaaaggacagggatttttgttcttgttgttctcgttgttgttttaagtttactggggaaagtgcatttggccaaatgaaatggtagtcaagcctattgcaacaaagttaggaagtttgttgtttgtttattataaacaaaaagcatgtgaaagtgcacttaagatagagtttttattaattacttacttattacctagattttaaatagacaatccaaagtctccccttcgtgttgccatcatcttgttgaatcagccattttatcgaggcacgtgatcagtgttgcaacataatgaaaaagatggctactgtgccttgtgttacttaatcatacagtaagctgacctggaaatgaatgaaactattactcctaagaattacattgtatagccccacagattaaatttaattaattaattcaaaacatgttaaacgttactttcatgtactatggaaaagtacaagtaggtttacattactgatttccagaagtaagtagtttcccctttcctagtcttctgtgtatgtgatgttgttaatttcttttattgcattataaaataaaaggattatgtatttttaactaaggtgagacattgatatatccttttgctacaagctatagctaatgtgctgagcttgtgccttggtgattgattgattgattgactgattgttttaactgattactgtagatcaacctgatgatttgtttgtttgaaattggcaggaaaaatgcagctttcaaatcattggggggagaaaaaggatgtctttcaggattattttaattaatttttttcataattgagacagaactgtttgttatgtaccataatgctaaataaaactgtggcacttttcaccataatttaatttagtggaaaaagaagacaatgctttccatattgtgataaggtaacatggggtttttctgggccagcctttagaacactgttagggtacatacgctaccttgatgaaagggaccttcgtgcaactgtagtcatcttaaaggcttctcatccactgtgcttcttaatgtgtaattaaagtgaggagaaattaaatactctgagggcgttttatataataaattcgtgaagaaatgtgtgctcttca

SEQ ID NO: 688 - DNA, 5416 bp, Homo sapiens
  source 1..5416: mol_type = genomic DNA
gctgcctgccgggatactcggcccgcccagccagtcctcccgtcttgcgccgcggccgcgagatccgtgtgtctcccaagatggtggcgctgggctcggggtgactacaggagacgacggggccttttcccttcgccaggacccgacacaccaggcttcgctcgctcgcgcacccctccgccgcgtagccatccgccagcgcgggcgcccgccatccgccgcctacttacgcttcacctctgccgacccggcgcgctcggctgcgggcggcggcgcctccttcggctcctcctcggaatagctcgcggcctgtagcccctggcaggagggcccctcagccccccggtgtggacaggcagcggcggctggcgacgaacgccgggatttcggcggccccggcgctccctttcccggcctcgttttccggataaggaagcgcgggtcccgcatgagccccggcggtggcggcagcgaaagagaacgaggcggtggcgggcggaggcggcgggcgagggcgactacgaccagtgaggcggccgccgcagcccaggcgcgggggcgacgacaggttaaaaatctgtaagagcctgattttagaattcaccagctcctcagaagtttggcgaaatatgagttattaagcctacgctcagatcaaggtagcagctagactggtgtgacaacctgtttttaatcagtgactcaaagctgtgatcaccctgatgtcaccgaatggccacagcttgtaaaagctctgcctccttacagtatgacatctgatgctggagggtcgcactttcaaaaatgagtcagctggtacatggggttatcatcaatttttagctcttctgtctgggagatacaagtttggaagcaatcttggggtacttacccacaaggctggtggagaccagatcaggagaacctcagtctgacgacattgaagctagccgaatgaagcgagcagctgcaaagcatctaatagaacgctactaccaccagttaactgagggctgtggaaatgaagcctgcacgaatgagttttgtgcttcctgtccaacttttcttcgtatggataataatgcagcagctattaaagccctcgagctttataagattaatgcaaaactctgtgatcctcatccctccaagaaaggagcaagctcagcttaccttgagaactcgaaaggtgcccccaacaactcctgctctgagataaaaatgaacaagaaaggcgctagaattgattttaaagatgtgacttacttaacagaagagaaggtatatgaaattcttgaattatgtagagaaagagaggattattcccctttaatccgtgttattggaagagttttttctagtgctgaggcattggtacagagcttccggaaagttaaacaacacaccaaggaagaactgaaatctcttcaagcaaaagatgaagacaaagatgaagatgaaaaggaaaaagctgcatgttctgctgctgctatggaagaagactcagaagcatcttcctcaaggataggtgatagctcacagggagacaacaatttgcaaaaattaggccctgatgatgtgtctgtggatattgatgccattagaagggtctacaccagattgctctctaatgaaaaaattgaaactgcctttctcaatgcacttgtatatttgtcacctaacgtggaatgtgacttgacgtatcacaatgtatactctcgagatcctaattatctgaatttgttcattatcgtaatggagaatagaaatctccacagtcctgaatatctggaaatggctttgccattattttgcaaagcgatgagcaagctaccccttgcagcccaaggaaaactgatcagactgtggtctaaatacaatgcagaccagattcggagaatgatggagacatttcagcaacttattacttataaagtcataagcaatgaatttaacagtcgaaatctagtgaatgatgatgatgccattgttgctgcttcgaagtgcttgaaaatggtttactatgcaaatgtagtgggaggggaagtggacacaaatcacaatgaagaagatgatgaagagcccatccctgagtccagcgagctgacacttcaggaacttttgggagaagaaagaagaaacaagaaaggtcctcgagtggaccccctggaaactgaacttggtgttaaaaccctggattgtcgaaaaccacttatcccttttgaagagtttattaatgaaccactgaatgaggttctagaaatggataaagattatacttttttcaaagtagaaacagagaacaaattctcttttatgacatgtccctttatattgaatgctgtcacaaagaatttgggattatattatgacaatagaattcgcatgtacagtgaacgaagaatcactgttctctacagcttagttcaaggacagcagttgaatccatatttgagactcaaagttagacgtgaccatatcatagatgatgcacttgtccggctagagatgatcgctatggaaaatcctgcagacttgaagaagcagttgtatgtggaatttgaaggagaacaaggagttgatgagggaggtgtttccaaagaattttttcagctggttgtggaggaaatcttcaatccagatattggtatgttcacatacgatgaatctacaaaattgttttggtttaatccatcttcttttgaaactgagggtcagtttactctgattggcatagtactgggtctggctatttacaataactgtatactggatgtacattttcccatggttgtctacaggaagctaatggggaaaaaaggaacttttcgtgacttgggagactctcacccagttctatatcagagtttaaaagatttattggagtatgaagggaatgtggaagatgacatgatgatcactttccagatatcacagacagatctttttggtaacccaatgatgtatgatctaaaggaaaatggtgataaaattccaattacaaatgaaaacaggaaggaatttgtcaatctttattctgactacattctcaataaatcagtagaaaaacagttcaaggcttttcggagaggttttcatatggtgaccaatgaatctcccttaaagtacttattcagaccagaagaaattgaattgcttatatgtggaagccggaatctagatttccaagcactagaagaaactacagaatatgacggtggctataccagggactctgttctgattagggagttctgggaaatcgttcattcatttacagatgaacagaaaagactcttcttgcagtttacaacgggcacagacagagcacctgtgggaggactaggaaaattaaagatgattatagccaaaaatggcccagacacagaaaggttacctacatctcatacttgctttaatgtgcttttacttccggaatactcaagcaaagaaaaacttaaagagagattgttgaaggccatcacgtatgccaaaggatttggcatgctgtaaaacaaaacaaaacaaaataaaacaaaaaaaaggaaggaaaaaaaaagaaaaaatttaaaaaattttaaaaatataacgagggataaatttttggtggtgatagtgtcccagtacaaaaaggctgtaagatagtcaaccacagtagtcacctatgtctgtgcctcccttctttattggggacatgtgggctggaacagcagatttcagctacatatatgaacaaatcctttattattattataattatttttttgcgtgaaagtgttacatattctttcacttgtatgtacagagaggtttttctgaatatttattttaagggttaaatcacttttgcttgtgtttattactgcttgaggttgagccttttgagtatttaaaaaatatataccaacagaactactctcccaaggaaaatattgccaccatttgtagaccacgtaaccttcaagtatgtgctacttttttgtccctgtatctaactcaaatcaggaactgtattttttttaatgatttgcttttgaaacttgaagtcttgaaaacagtgtgatgcaattactgctgttctagcccccaaagagttttctgtgcaaaatcttgagaatcaatcaataaagaaagatggaaggaagggagaaattggaatgttttaactgcagccctcagaactttagtaacagcacaacaaattaaaaacaaaaacaactcatgccacagtatgtcgtcttcatgtgtcttgcaatgaactgtttcagtagccaatcctctttcttagtatatgaaaggacagggatttttgttcttgttgttctcgttgttgttttaagtttactggggaaagtgcatttggccaaatgaaatggtagtcaagcctattgcaacaaagttaggaagtttgttgtttgtttattataaacaaaaagcatgtgaaagtgcacttaagatagagtttttattaattacttacttattacctagattttaaatagacaatccaaagtctccccttcgtgttgccatcatcttgttgaatcagccattttatcgaggcacgtgatcagtgttgcaacataatgaaaaagatggctactgtgccttgtgttacttaatcatacagtaagctgacctggaaatgaatgaaactattactcctaagaattacattgtatagccccacagattaaatttaattaattaattcaaaacatgttaaacgttactttcatgtactatggaaaagtacaagtaggtttacattactgatttccagaagtaagtagtttcccctttcctagtcttctgtgtatgtgatgttgttaatttcttttattgcattataaaataaaaggattatgtatttttaactaaggtgagacattgatatatccttttgctacaagctatagctaatgtgctgagcttgtgccttggtgattgattgattgattgactgattgttttaactgattactgtagatcaacctgatgatttgtttgtttgaaattggcaggaaaaatgcagctttcaaatcattggggggagaaaaaggatgtctttcaggattattttaattaatttttttcataattgagacagaactgtttgttatgtaccataatgctaaataaaactgtggcacttttcaccataatttaatttagtggaaaaagaagacaatgctttccatattgtgataaggtaacatggggtttttctgggccagcctttagaacactgttagggtacatacgctaccttgatgaaagggaccttcgtgcaactgtagtcatcttaaaggcttctcatccactgtgcttcttaatgtgtaattaaagtgaggagaaattaaatactctgagggcgttttatataataaattcgtgaagaaatgtgtgctcttca

SEQ ID NO: 689 - DNA, 5420 bp, Homo sapiens
  source 1..5420: mol_type = genomic DNA
gctgcctgccgggatactcggcccgcccagccagtcctcccgtcttgcgccgcggccgcgagatccgtgtgtctcccaagatggtggcgctgggctcggggtgactacaggagacgacggggccttttcccttcgccaggacccgacacaccaggcttcgctcgctcgcgcacccctccgccgcgtagccatccgccagcgcgggcgcccgccatccgccgcctacttacgcttcacctctgccgacccggcgcgctcggctgcgggcggcggcgcctccttcggctcctcctcggaatagctcgcggcctgtagcccctggcaggagggcccctcagccccccggtgtggacaggcagcggcggctggcgacgaacgccgggatttcggcggccccggcgctccctttcccggcctcgttttccggataaggaagcgcgggtcccgcatgagccccggcggtggcggcagcgaaagagaacgaggcggtggcgggcggaggcggcgggcgagggcgactacgaccagtgaggcggccgccgcagcccaggcgcgggggcgacgacaggttaaaaatctgtaagagcctgattttagaattcaccagctcctcagaagtttggcgaaatatgagttattaagcctacgctcagatcaaggtagcagctagactggtgtgacaacctgtttttaatcagtgactcaaagctgtgatcaccctgatgtcaccgaatggccacagcttgtaaaagccagctctgcctccttacagtatgacatctgatgctggagggtcgcactttcaaaaatgagtcagctggtacatggggttatcatcaatttttagctcttctgtctgggagatacaagtttggaagcaatcttggggtacttacccacaaggctggtggagaccagatcaggagaacctcagtctgacgacattgaagctagccgaatgaagcgagcagctgcaaagcatctaatagaacgctactaccaccagttaactgagggctgtggaaatgaagcctgcacgaatgagttttgtgcttcctgtccaacttttcttcgtatggataataatgcagcagctattaaagccctcgagctttataagattaatgcaaaactctgtgatcctcatccctccaagaaaggagcaagctcagcttaccttgagaactcgaaaggtgcccccaacaactcctgctctgagataaaaatgaacaagaaaggcgctagaattgattttaaagatgtgacttacttaacagaagagaaggtatatgaaattcttgaattatgtagagaaagagaggattattcccctttaatccgtgttattggaagagttttttctagtgctgaggcattggtacagagcttccggaaagttaaacaacacaccaaggaagaactgaaatctcttcaagcaaaagatgaagacaaagatgaagatgaaaaggaaaaagctgcatgttctgctgctgctatggaagaagactcagaagcatcttcctcaaggataggtgatagctcacagggagacaacaatttgcaaaaattaggccctgatgatgtgtctgtggatattgatgccattagaagggtctacaccagattgctctctaatgaaaaaattgaaactgcctttctcaatgcacttgtatatttgtcacctaacgtggaatgtgacttgacgtatcacaatgtatactctcgagatcctaattatctgaatttgttcattatcgtaatggagaatagaaatctccacagtcctgaatatctggaaatggctttgccattattttgcaaagcgatgagcaagctaccccttgcagcccaaggaaaactgatcagactgtggtctaaatacaatgcagaccagattcggagaatgatggagacatttcagcaacttattacttataaagtcataagcaatgaatttaacagtcgaaatctagtgaatgatgatgatgccattgttgctgcttcgaagtgcttgaaaatggtttactatgcaaatgtagtgggaggggaagtggacacaaatcacaatgaagaagatgatgaagagcccatccctgagtccagcgagctgacacttcaggaacttttgggagaagaaagaagaaacaagaaaggtcctcgagtggaccccctggaaactgaacttggtgttaaaaccctggattgtcgaaaaccacttatcccttttgaagagtttattaatgaaccactgaatgaggttctagaaatggataaagattatacttttttcaaagtagaaacagagaacaaattctcttttatgacatgtccctttatattgaatgctgtcacaaagaatttgggattatattatgacaatagaattcgcatgtacagtgaacgaagaatcactgttctctacagcttagttcaaggacagcagttgaatccatatttgagactcaaagttagacgtgaccatatcatagatgatgcacttgtccggctagagatgatcgctatggaaaatcctgcagacttgaagaagcagttgtatgtggaatttgaaggagaacaaggagttgatgagggaggtgtttccaaagaattttttcagctggttgtggaggaaatcttcaatccagatattggtatgttcacatacgatgaatctacaaaattgttttggtttaatccatcttcttttgaaactgagggtcagtttactctgattggcatagtactgggtctggctatttacaataactgtatactggatgtacattttcccatggttgtctacaggaagctaatggggaaaaaaggaacttttcgtgacttgggagactctcacccagttctatatcagagtttaaaagatttattggagtatgaagggaatgtggaagatgacatgatgatcactttccagatatcacagacagatctttttggtaacccaatgatgtatgatctaaaggaaaatggtgataaaattccaattacaaatgaaaacaggaaggaatttgtcaatctttattctgactacattctcaataaatcagtagaaaaacagttcaaggcttttcggagaggttttcatatggtgaccaatgaatctcccttaaagtacttattcagaccagaagaaattgaattgcttatatgtggaagccggaatctagatttccaagcactagaagaaactacagaatatgacggtggctataccagggactctgttctgattagggagttctgggaaatcgttcattcatttacagatgaacagaaaagactcttcttgcagtttacaacgggcacagacagagcacctgtgggaggactaggaaaattaaagatgattatagccaaaaatggcccagacacagaaaggttacctacatctcatacttgctttaatgtgcttttacttccggaatactcaagcaaagaaaaacttaaagagagattgttgaaggccatcacgtatgccaaaggatttggcatgctgtaaaacaaaacaaaacaaaataaaacaaaaaaaaggaaggaaaaaaaaagaaaaaatttaaaaaattttaaaaatataacgagggataaatttttggtggtgatagtgtcccagtacaaaaaggctgtaagatagtcaaccacagtagtcacctatgtctgtgcctcccttctttattggggacatgtgggctggaacagcagatttcagctacatatatgaacaaatcctttattattattataattatttttttgcgtgaaagtgttacatattctttcacttgtatgtacagagaggtttttctgaatatttattttaagggttaaatcacttttgcttgtgtttattactgcttgaggttgagccttttgagtatttaaaaaatatataccaacagaactactctcccaaggaaaatattgccaccatttgtagaccacgtaaccttcaagtatgtgctacttttttgtccctgtatctaactcaaatcaggaactgtattttttttaatgatttgcttttgaaacttgaagtcttgaaaacagtgtgatgcaattactgctgttctagcccccaaagagttttctgtgcaaaatcttgagaatcaatcaataaagaaagatggaaggaagggagaaattggaatgttttaactgcagccctcagaactttagtaacagcacaacaaattaaaaacaaaaacaactcatgccacagtatgtcgtcttcatgtgtcttgcaatgaactgtttcagtagccaatcctctttcttagtatatgaaaggacagggatttttgttcttgttgttctcgttgttgttttaagtttactggggaaagtgcatttggccaaatgaaatggtagtcaagcctattgcaacaaagttaggaagtttgttgtttgtttattataaacaaaaagcatgtgaaagtgcacttaagatagagtttttattaattacttacttattacctagattttaaatagacaatccaaagtctccccttcgtgttgccatcatcttgttgaatcagccattttatcgaggcacgtgatcagtgttgcaacataatgaaaaagatggctactgtgccttgtgttacttaatcatacagtaagctgacctggaaatgaatgaaactattactcctaagaattacattgtatagccccacagattaaatttaattaattaattcaaaacatgttaaacgttactttcatgtactatggaaaagtacaagtaggtttacattactgatttccagaagtaagtagtttcccctttcctagtcttctgtgtatgtgatgttgttaatttcttttattgcattataaaataaaaggattatgtatttttaactaaggtgagacattgatatatccttttgctacaagctatagctaatgtgctgagcttgtgccttggtgattgattgattgattgactgattgttttaactgattactgtagatcaacctgatgatttgtttgtttgaaattggcaggaaaaatgcagctttcaaatcattggggggagaaaaaggatgtctttcaggattattttaattaatttttttcataattgagacagaactgtttgttatgtaccataatgctaaataaaactgtggcacttttcaccataatttaatttagtggaaaaagaagacaatgctttccatattgtgataaggtaacatggggtttttctgggccagcctttagaacactgttagggtacatacgctaccttgatgaaagggaccttcgtgcaactgtagtcatcttaaaggcttctcatccactgtgcttcttaatgtgtaattaaagtgaggagaaattaaatactctgagggcgttttatataataaattcgtgaagaaatgtgtgctcttca

SEQ ID NO: 690 - DNA, 5294 bp, Homo sapiens
  source 1..5294: mol_type = genomic DNA
gctgcctgccgggatactcggcccgcccagccagtcctcccgtcttgcgccgcggccgcgagatccgtgtgtctcccaagatggtggcgctgggctcggggtgactacaggagacgacggggccttttcccttcgccaggacccgacacaccaggcttcgctcgctcgcgcacccctccgccgcgtagccatccgccagcgcgggcgcccgccatccgccgcctacttacgcttcacctctgccgacccggcgcgctcggctgcgggcggcggcgcctccttcggctcctcctcggaatagctcgcggcctgtagcccctggcaggagggcccctcagccccccggtgtggacaggcagcggcggctggcgacgaacgccgggatttcggcggccccggcgctccctttcccggcctcgttttccggataaggaagcgcgggtcccgcatgagccccggcggtggcggcagcgaaagagaacgaggcggtggcgggcggaggcggcgggcgagggcgactacgaccagtgaggcggccgccgcagcccaggcgcgggggcgacgacaggttaaaaatctgtaagagcctgattttagaattcaccagctcctcagaagtttggcgaaatatgagttattaagcctacgctcagatcaaggtagcagctagactggtgtgacaacctgtttttaatcagtgactcaaagctgtgatcaccctgatgtcaccgaatggccacagcttgtaaaagtgccagcaggtttattttttgttttgcaagccagctctgcctccttacagtatgacatctgatgctggagggtcgcactttcaaaaatgagtcagctggtacatggggttatcatcaatttttagctcttctgtctgggagatacaagtttggaagcaatcttggggtacttacccacaaggctggtggagaccagatcaggagaacctcagtctgacgacattgaagctagccgaatgaagcgagcagctgcaaagcatctaatagaacgctactaccaccagttaactgagggctgtggaaatgaagcctgcacgaatgagttttgtgcttcctgtccaacttttcttcgtatggataataatgcagcagctattaaagccctcgagctttataagattaatgcaaaactctgtgatcctcatccctccaagaaaggagcaagctcagcttaccttgagaactcgaaaggtgcccccaacaactcctgctctgagataaaaatgaacaagaaaggcgctagaattgattttaaagatgtgacttacttaacagaagagaaggtatatgaaattcttgaattatgtagagaaagagaggattattcccctttaatccgtgttattggaagagttttttctagtgctgaggcattggtacagagcttccggaaagttaaacaacacaccaaggaagaactgaaatctcttcaagcaaaagatgaagacaaagatgaagatgaaaaggaaaaagctgcatgttctgctgctgctatggaagaagactcagaagcatcttcctcaaggataggtgatagctcacagggagacaacaatttgcaaaaattaggccctgatgatgtgtctgtggatattgatgccattagaagggtctacaccagattgctctctaatgaaaaaattgaaactgcctttctcaatgcacttgtatatttgtcacctaacgtggaatgtgacttgacgtatcacaatgtatactctcgagatcctaattatctgaatttgttcattatcgtaatggagaatagaaatctccacagtcctgaatatctggaaatggctttgccattattttgcaaagcgatgagcaagctaccccttgcagcccaaggaaaactgatcagactgtggtctaaatacaatgcagaccagattcggagaatgatggagacatttcagcaacttattacttataaagtcataagcaatgaatttaacagtcgaaatctagtgaatgatgatgatgccattgttgctgcttcgaagtgcttgaaaatggtttactatgcaaatgtagtgggaggggaagtggacacaaatcacaatgaagaagatgatgaagagcccatccctgagtccagcgagctgacacttcaggaacttttgggagaagaaagaagaaacaagaaaggtcctcgagtggaccccctggaaactgaacttggtgttaaaaccctggattgtcgaaaaccacttatcccttttgaagagtttattaatgaaccactgaatgaggttctagaaatggataaagattatacttttttcaaagtagaaacagagaacaaattctcttttatgacatgtccctttatattgaatgctgtcacaaagaatttgggattatattatgacaatagaattcgcatgtacagtgaacgaagaatcactgttctctacagcttagttcaaggacagcagttgaatccatatttgagactcaaagttagacgtgaccatatcatagatgatgcacttgtccggctagagatgatcgctatggaaaatcctgcagacttgaagaagcagttgtatgtggaatttgaaggagaacaaggagttgatgagggaggtgtttccaaagaattttttcagctggttgtggaggaaatcttcaatccagatattggtatgttcacatacgatgaatctacaaaattgttttggtttaatccatcttcttttgaaactgagggtcagtttactctgattggcatagtactgggtctggctatttacaataactgtatactggatgtacattttcccatggttgtctacaggaagctaatggggaaaaaaggaacttttcgtgacttgggagactctcacccagttctatatcagagtttaaaagatttattggagtatgaagggaatgtggaagatgacatgatgatcactttccagatatcacagacagatctttttggtaacccaatgatgtatgatctaaaggaaaatggtgataaaattccaattacaaatgaaaacaggaagaatctagatttccaagcactagaagaaactacagaatatgacggtggctataccagggactctgttctgattagggagttctgggaaatcgttcattcatttacagatgaacagaaaagactcttcttgcagtttacaacgggcacagacagagcacctgtgggaggactaggaaaattaaagatgattatagccaaaaatggcccagacacagaaaggttacctacatctcatacttgctttaatgtgcttttacttccggaatactcaagcaaagaaaaacttaaagagagattgttgaaggccatcacgtatgccaaaggatttggcatgctgtaaaacaaaacaaaacaaaataaaacaaaaaaaaggaaggaaaaaaaaagaaaaaatttaaaaaattttaaaaatataacgagggataaatttttggtggtgatagtgtcccagtacaaaaaggctgtaagatagtcaaccacagtagtcacctatgtctgtgcctcccttctttattggggacatgtgggctggaacagcagatttcagctacatatatgaacaaatcctttattattattataattatttttttgcgtgaaagtgttacatattctttcacttgtatgtacagagaggtttttctgaatatttattttaagggttaaatcacttttgcttgtgtttattactgcttgaggttgagccttttgagtatttaaaaaatatataccaacagaactactctcccaaggaaaatattgccaccatttgtagaccacgtaaccttcaagtatgtgctacttttttgtccctgtatctaactcaaatcaggaactgtattttttttaatgatttgcttttgaaacttgaagtcttgaaaacagtgtgatgcaattactgctgttctagcccccaaagagttttctgtgcaaaatcttgagaatcaatcaataaagaaagatggaaggaagggagaaattggaatgttttaactgcagccctcagaactttagtaacagcacaacaaattaaaaacaaaaacaactcatgccacagtatgtcgtcttcatgtgtcttgcaatgaactgtttcagtagccaatcctctttcttagtatatgaaaggacagggatttttgttcttgttgttctcgttgttgttttaagtttactggggaaagtgcatttggccaaatgaaatggtagtcaagcctattgcaacaaagttaggaagtttgttgtttgtttattataaacaaaaagcatgtgaaagtgcacttaagatagagtttttattaattacttacttattacctagattttaaatagacaatccaaagtctccccttcgtgttgccatcatcttgttgaatcagccattttatcgaggcacgtgatcagtgttgcaacataatgaaaaagatggctactgtgccttgtgttacttaatcatacagtaagctgacctggaaatgaatgaaactattactcctaagaattacattgtatagccccacagattaaatttaattaattaattcaaaacatgttaaacgttactttcatgtactatggaaaagtacaagtaggtttacattactgatttccagaagtaagtagtttcccctttcctagtcttctgtgtatgtgatgttgttaatttcttttattgcattataaaataaaaggattatgtatttttaactaaggtgagacattgatatatccttttgctacaagctatagctaatgtgctgagcttgtgccttggtgattgattgattgattgactgattgttttaactgattactgtagatcaacctgatgatttgtttgtttgaaattggcaggaaaaatgcagctttcaaatcattggggggagaaaaaggatgtctttcaggattattttaattaatttttttcataattgagacagaactgtttgttatgtaccataatgctaaataaaactgtggcacttttcaccataatttaatttagtggaaaaagaagacaatgctttccatattgtgataaggtaacatggggtttttctgggccagcctttagaacactgttagggtacatacgctaccttgatgaaagggaccttcgtgcaactgtagtcatcttaaaggcttctcatccactgtgcttcttaatgtgtaattaaagtgaggagaaattaaatactctgagggcgttttatataataaattcgtgaagaaatgtgtgctcttca

SEQ ID NO: 691 - DNA, 5450 bp, Homo sapiens
  source 1..5450: mol_type = genomic DNA
gctgcctgccgggatactcggcccgcccagccagtcctcccgtcttgcgccgcggccgcgagatccgtgtgtctcccaagatggtggcgctgggctcggggtgactacaggagacgacggggccttttcccttcgccaggacccgacacaccaggcttcgctcgctcgcgcacccctccgccgcgtagccatccgccagcgcgggcgcccgccatccgccgcctacttacgcttcacctctgccgacccggcgcgctcggctgcgggcggcggcgcctccttcggctcctcctcggaatagctcgcggcctgtagcccctggcaggagggcccctcagccccccggtgtggacaggcagcggcggctggcgacgaacgccgggatttcggcggccccggcgctccctttcccggcctcgttttccggataaggaagcgcgggtcccgcatgagccccggcggtggcggcagcgaaagagaacgaggcggtggcgggcggaggcggcgggcgagggcgactacgaccagtgaggcggccgccgcagcccaggcgcgggggcgacgacaggttaaaaatctgtaagagcctgattttagaattcaccagctcctcagaagtttggcgaaatatgagttattaagcctacgctcagatcaaggtagcagctagactggtgtgacaacctgtttttaatcagtgactcaaagctgtgatcaccctgatgtcaccgaatggccacagcttgtaaaagtgccagcaggtttattttttgttttgcaagccagctctgcctccttacagtatgacatctgatgctggagggtcgcactttcaaaaatgagtcagctggtacatggggttatcatcaatttttagctcttctgtctgggagatacaagtttggaagcaatcttggggtacttacccacaaggctggtggagaccagatcaggagaacctcagtctgacgacattgaagctagccgaatgaagcgagcagctgcaaagcatctaatagaacgctactaccaccagttaactgagggctgtggaaatgaagcctgcacgaatgagttttgtgcttcctgtccaacttttcttcgtatggataataatgcagcagctattaaagccctcgagctttataagattaatgcaaaactctgtgatcctcatccctccaagaaaggagcaagctcagcttaccttgagaactcgaaaggtgcccccaacaactcctgctctgagataaaaatgaacaagaaaggcgctagaattgattttaaagatgtgacttacttaacagaagagaaggtatatgaaattcttgaattatgtagagaaagagaggattattcccctttaatccgtgttattggaagagttttttctagtgctgaggcattggtacagagcttccggaaagttaaacaacacaccaaggaagaactgaaatctcttcaagcaaaagatgaagacaaagatgaagatgaaaaggaaaaagctgcatgttctgctgctgctatggaagaagactcagaagcatcttcctcaaggataggtgatagctcacagggagacaacaatttgcaaaaattaggccctgatgatgtgtctgtggatattgatgccattagaagggtctacaccagattgctctctaatgaaaaaattgaaactgcctttctcaatgcacttgtatatttgtcacctaacgtggaatgtgacttgacgtatcacaatgtatactctcgagatcctaattatctgaatttgttcattatcgtaatggagaatagaaatctccacagtcctgaatatctggaaatggctttgccattattttgcaaagcgatgagcaagctaccccttgcagcccaaggaaaactgatcagactgtggtctaaatacaatgcagaccagattcggagaatgatggagacatttcagcaacttattacttataaagtcataagcaatgaatttaacagtcgaaatctagtgaatgatgatgatgccattgttgctgcttcgaagtgcttgaaaatggtttactatgcaaatgtagtgggaggggaagtggacacaaatcacaatgaagaagatgatgaagagcccatccctgagtccagcgagctgacacttcaggaacttttgggagaagaaagaagaaacaagaaaggtcctcgagtggaccccctggaaactgaacttggtgttaaaaccctggattgtcgaaaaccacttatcccttttgaagagtttattaatgaaccactgaatgaggttctagaaatggataaagattatacttttttcaaagtagaaacagagaacaaattctcttttatgacatgtccctttatattgaatgctgtcacaaagaatttgggattatattatgacaatagaattcgcatgtacagtgaacgaagaatcactgttctctacagcttagttcaaggacagcagttgaatccatatttgagactcaaagttagacgtgaccatatcatagatgatgcacttgtccggctagagatgatcgctatggaaaatcctgcagacttgaagaagcagttgtatgtggaatttgaaggagaacaaggagttgatgagggaggtgtttccaaagaattttttcagctggttgtggaggaaatcttcaatccagatattggtatgttcacatacgatgaatctacaaaattgttttggtttaatccatcttcttttgaaactgagggtcagtttactctgattggcatagtactgggtctggctatttacaataactgtatactggatgtacattttcccatggttgtctacaggaagctaatggggaaaaaaggaacttttcgtgacttgggagactctcacccagttctatatcagagtttaaaagatttattggagtatgaagggaatgtggaagatgacatgatgatcactttccagatatcacagacagatctttttggtaacccaatgatgtatgatctaaaggaaaatggtgataaaattccaattacaaatgaaaacaggaaggaatttgtcaatctttattctgactacattctcaataaatcagtagaaaaacagttcaaggcttttcggagaggttttcatatggtgaccaatgaatctcccttaaagtacttattcagaccagaagaaattgaattgcttatatgtggaagccggaatctagatttccaagcactagaagaaactacagaatatgacggtggctataccagggactctgttctgattagggagttctgggaaatcgttcattcatttacagatgaacagaaaagactcttcttgcagtttacaacgggcacagacagagcacctgtgggaggactaggaaaattaaagatgattatagccaaaaatggcccagacacagaaaggttacctacatctcatacttgctttaatgtgcttttacttccggaatactcaagcaaagaaaaacttaaagagagattgttgaaggccatcacgtatgccaaaggatttggcatgctgtaaaacaaaacaaaacaaaataaaacaaaaaaaaggaaggaaaaaaaaagaaaaaatttaaaaaattttaaaaatataacgagggataaatttttggtggtgatagtgtcccagtacaaaaaggctgtaagatagtcaaccacagtagtcacctatgtctgtgcctcccttctttattggggacatgtgggctggaacagcagatttcagctacatatatgaacaaatcctttattattattataattatttttttgcgtgaaagtgttacatattctttcacttgtatgtacagagaggtttttctgaatatttattttaagggttaaatcacttttgcttgtgtttattactgcttgaggttgagccttttgagtatttaaaaaatatataccaacagaactactctcccaaggaaaatattgccaccatttgtagaccacgtaaccttcaagtatgtgctacttttttgtccctgtatctaactcaaatcaggaactgtattttttttaatgatttgcttttgaaacttgaagtcttgaaaacagtgtgatgcaattactgctgttctagcccccaaagagttttctgtgcaaaatcttgagaatcaatcaataaagaaagatggaaggaagggagaaattggaatgttttaactgcagccctcagaactttagtaacagcacaacaaattaaaaacaaaaacaactcatgccacagtatgtcgtcttcatgtgtcttgcaatgaactgtttcagtagccaatcctctttcttagtatatgaaaggacagggatttttgttcttgttgttctcgttgttgttttaagtttactggggaaagtgcatttggccaaatgaaatggtagtcaagcctattgcaacaaagttaggaagtttgttgtttgtttattataaacaaaaagcatgtgaaagtgcacttaagatagagtttttattaattacttacttattacctagattttaaatagacaatccaaagtctccccttcgtgttgccatcatcttgttgaatcagccattttatcgaggcacgtgatcagtgttgcaacataatgaaaaagatggctactgtgccttgtgttacttaatcatacagtaagctgacctggaaatgaatgaaactattactcctaagaattacattgtatagccccacagattaaatttaattaattaattcaaaacatgttaaacgttactttcatgtactatggaaaagtacaagtaggtttacattactgatttccagaagtaagtagtttcccctttcctagtcttctgtgtatgtgatgttgttaatttcttttattgcattataaaataaaaggattatgtatttttaactaaggtgagacattgatatatccttttgctacaagctatagctaatgtgctgagcttgtgccttggtgattgattgattgattgactgattgttttaactgattactgtagatcaacctgatgatttgtttgtttgaaattggcaggaaaaatgcagctttcaaatcattggggggagaaaaaggatgtctttcaggattattttaattaatttttttcataattgagacagaactgtttgttatgtaccataatgctaaataaaactgtggcacttttcaccataatttaatttagtggaaaaagaagacaatgctttccatattgtgataaggtaacatggggtttttctgggccagcctttagaacactgttagggtacatacgctaccttgatgaaagggaccttcgtgcaactgtagtcatcttaaaggcttctcatccactgtgcttcttaatgtgtaattaaagtgaggagaaattaaatactctgagggcgttttatataataaattcgtgaagaaatgtgtgctcttca

SEQ ID NO: 692 - DNA, 5390 bp, Homo sapiens
  source 1..5390: mol_type = genomic DNA
gctgcctgccgggatactcggcccgcccagccagtcctcccgtcttgcgccgcggccgcgagatccgtgtgtctcccaagatggtggcgctgggctcggggtgactacaggagacgacggggccttttcccttcgccaggacccgacacaccaggcttcgctcgctcgcgcacccctccgccgcgtagccatccgccagcgcgggcgcccgccatccgccgcctacttacgcttcacctctgccgacccggcgcgctcggctgcgggcggcggcgcctccttcggctcctcctcggaatagctcgcggcctgtagcccctggcaggagggcccctcagccccccggtgtggacaggcagcggcggctggcgacgaacgccgggatttcggcggccccggcgctccctttcccggcctcgttttccggataaggaagcgcgggtcccgcatgagccccggcggtggcggcagcgaaagagaacgaggcggtggcgggcggaggcggcgggcgagggcgactacgaccagtgaggcggccgccgcagcccaggcgcgggggcgacgacaggttaaaaatctgtaagagcctgattttagaattcaccagctcctcagaagtttggcgaaatatgagttattaagcctacgctcagatcaaggtagcagctagactggtgtgacaacctgtttttaatcagtgactcaaagctgtgatcaccctgatgtcaccgaatggccacagcttgtaaaagagagttacagtggaggtaaaaggagtggcttgcaggatggagaagctgcaccagtgttattggaactcttctgtctgggagatacaagtttggaagcaatcttggggtacttacccacaaggctggtggagaccagatcaggagaacctcagtctgacgacattgaagctagccgaatgaagcgagcagctgcaaagcatctaatagaacgctactaccaccagttaactgagggctgtggaaatgaagcctgcacgaatgagttttgtgcttcctgtccaacttttcttcgtatggataataatgcagcagctattaaagccctcgagctttataagattaatgcaaaactctgtgatcctcatccctccaagaaaggagcaagctcagcttaccttgagaactcgaaaggtgcccccaacaactcctgctctgagataaaaatgaacaagaaaggcgctagaattgattttaaagatgtgacttacttaacagaagagaaggtatatgaaattcttgaattatgtagagaaagagaggattattcccctttaatccgtgttattggaagagttttttctagtgctgaggcattggtacagagcttccggaaagttaaacaacacaccaaggaagaactgaaatctcttcaagcaaaagatgaagacaaagatgaagatgaaaaggaaaaagctgcatgttctgctgctgctatggaagaagactcagaagcatcttcctcaaggataggtgatagctcacagggagacaacaatttgcaaaaattaggccctgatgatgtgtctgtggatattgatgccattagaagggtctacaccagattgctctctaatgaaaaaattgaaactgcctttctcaatgcacttgtatatttgtcacctaacgtggaatgtgacttgacgtatcacaatgtatactctcgagatcctaattatctgaatttgttcattatcgtaatggagaatagaaatctccacagtcctgaatatctggaaatggctttgccattattttgcaaagcgatgagcaagctaccccttgcagcccaaggaaaactgatcagactgtggtctaaatacaatgcagaccagattcggagaatgatggagacatttcagcaacttattacttataaagtcataagcaatgaatttaacagtcgaaatctagtgaatgatgatgatgccattgttgctgcttcgaagtgcttgaaaatggtttactatgcaaatgtagtgggaggggaagtggacacaaatcacaatgaagaagatgatgaagagcccatccctgagtccagcgagctgacacttcaggaacttttgggagaagaaagaagaaacaagaaaggtcctcgagtggaccccctggaaactgaacttggtgttaaaaccctggattgtcgaaaaccacttatcccttttgaagagtttattaatgaaccactgaatgaggttctagaaatggataaagattatacttttttcaaagtagaaacagagaacaaattctcttttatgacatgtccctttatattgaatgctgtcacaaagaatttgggattatattatgacaatagaattcgcatgtacagtgaacgaagaatcactgttctctacagcttagttcaaggacagcagttgaatccatatttgagactcaaagttagacgtgaccatatcatagatgatgcacttgtccggctagagatgatcgctatggaaaatcctgcagacttgaagaagcagttgtatgtggaatttgaaggagaacaaggagttgatgagggaggtgtttccaaagaattttttcagctggttgtggaggaaatcttcaatccagatattggtatgttcacatacgatgaatctacaaaattgttttggtttaatccatcttcttttgaaactgagggtcagtttactctgattggcatagtactgggtctggctatttacaataactgtatactggatgtacattttcccatggttgtctacaggaagctaatggggaaaaaaggaacttttcgtgacttgggagactctcacccagttctatatcagagtttaaaagatttattggagtatgaagggaatgtggaagatgacatgatgatcactttccagatatcacagacagatctttttggtaacccaatgatgtatgatctaaaggaaaatggtgataaaattccaattacaaatgaaaacaggaaggaatttgtcaatctttattctgactacattctcaataaatcagtagaaaaacagttcaaggcttttcggagaggttttcatatggtgaccaatgaatctcccttaaagtacttattcagaccagaagaaattgaattgcttatatgtggaagccggaatctagatttccaagcactagaagaaactacagaatatgacggtggctataccagggactctgttctgattagggagttctgggaaatcgttcattcatttacagatgaacagaaaagactcttcttgcagtttacaacgggcacagacagagcacctgtgggaggactaggaaaattaaagatgattatagccaaaaatggcccagacacagaaaggttacctacatctcatacttgctttaatgtgcttttacttccggaatactcaagcaaagaaaaacttaaagagagattgttgaaggccatcacgtatgccaaaggatttggcatgctgtaaaacaaaacaaaacaaaataaaacaaaaaaaaggaaggaaaaaaaaagaaaaaatttaaaaaattttaaaaatataacgagggataaatttttggtggtgatagtgtcccagtacaaaaaggctgtaagatagtcaaccacagtagtcacctatgtctgtgcctcccttctttattggggacatgtgggctggaacagcagatttcagctacatatatgaacaaatcctttattattattataattatttttttgcgtgaaagtgttacatattctttcacttgtatgtacagagaggtttttctgaatatttattttaagggttaaatcacttttgcttgtgtttattactgcttgaggttgagccttttgagtatttaaaaaatatataccaacagaactactctcccaaggaaaatattgccaccatttgtagaccacgtaaccttcaagtatgtgctacttttttgtccctgtatctaactcaaatcaggaactgtattttttttaatgatttgcttttgaaacttgaagtcttgaaaacagtgtgatgcaattactgctgttctagcccccaaagagttttctgtgcaaaatcttgagaatcaatcaataaagaaagatggaaggaagggagaaattggaatgttttaactgcagccctcagaactttagtaacagcacaacaaattaaaaacaaaaacaactcatgccacagtatgtcgtcttcatgtgtcttgcaatgaactgtttcagtagccaatcctctttcttagtatatgaaaggacagggatttttgttcttgttgttctcgttgttgttttaagtttactggggaaagtgcatttggccaaatgaaatggtagtcaagcctattgcaacaaagttaggaagtttgttgtttgtttattataaacaaaaagcatgtgaaagtgcacttaagatagagtttttattaattacttacttattacctagattttaaatagacaatccaaagtctccccttcgtgttgccatcatcttgttgaatcagccattttatcgaggcacgtgatcagtgttgcaacataatgaaaaagatggctactgtgccttgtgttacttaatcatacagtaagctgacctggaaatgaatgaaactattactcctaagaattacattgtatagccccacagattaaatttaattaattaattcaaaacatgttaaacgttactttcatgtactatggaaaagtacaagtaggtttacattactgatttccagaagtaagtagtttcccctttcctagtcttctgtgtatgtgatgttgttaatttcttttattgcattataaaataaaaggattatgtatttttaactaaggtgagacattgatatatccttttgctacaagctatagctaatgtgctgagcttgtgccttggtgattgattgattgattgactgattgttttaactgattactgtagatcaacctgatgatttgtttgtttgaaattggcaggaaaaatgcagctttcaaatcattggggggagaaaaaggatgtctttcaggattattttaattaatttttttcataattgagacagaactgtttgttatgtaccataatgctaaataaaactgtggcacttttcaccataatttaatttagtggaaaaagaagacaatgctttccatattgtgataaggtaacatggggtttttctgggccagcctttagaacactgttagggtacatacgctaccttgatgaaagggaccttcgtgcaactgtagtcatcttaaaggcttctcatccactgtgcttcttaatgtgtaattaaagtgaggagaaattaaatactctgagggcgttttatataataaattcgtgaagaaatgtgtgctcttca

SEQ ID NO: 693 - DNA, 5481 bp, Homo sapiens
  source 1..5481: mol_type = genomic DNA
gctgcctgccgggatactcggcccgcccagccagtcctcccgtcttgcgccgcggccgcgagatccgtgtgtctcccaagatggtggcgctgggctcggggtgactacaggagacgacggggccttttcccttcgccaggacccgacacaccaggcttcgctcgctcgcgcacccctccgccgcgtagccatccgccagcgcgggcgcccgccatccgccgcctacttacgcttcacctctgccgacccggcgcgctcggctgcgggcggcggcgcctccttcggctcctcctcggaatagctcgcggcctgtagcccctggcaggagggcccctcagccccccggtgtggacaggcagcggcggctggcgacgaacgccgggatttcggcggccccggcgctccctttcccggcctcgttttccggataaggaagcgcgggtcccgcatgagccccggcggtggcggcagcgaaagagaacgaggcggtggcgggcggaggcggcgggcgagggcgactacgaccagtgaggcggccgccgcagcccaggcgcgggggcgacgacaggttaaaaatctgtaagagcctgattttagaattcaccagctcctcagaagtttggcgaaatatgagttattaagcctacgctcagatcaaggtagcagctagactggtgtgacaacctgtttttaatcagtgactcaaagctgtgatcaccctgatgtcaccgaatggccacagcttgtaaaagagagttacagtggaggtaaaaggagtggcttgcaggatggagaagctgcaccagtgttattggaactctgcctccttacagtatgacatctgatgctggagggtcgcactttcaaaaatgagtcagctggtacatggggttatcatcaatttttagctcttctgtctgggagatacaagtttggaagcaatcttggggtacttacccacaaggctggtggagaccagatcaggagaacctcagtctgacgacattgaagctagccgaatgaagcgagcagctgcaaagcatctaatagaacgctactaccaccagttaactgagggctgtggaaatgaagcctgcacgaatgagttttgtgcttcctgtccaacttttcttcgtatggataataatgcagcagctattaaagccctcgagctttataagattaatgcaaaactctgtgatcctcatccctccaagaaaggagcaagctcagcttaccttgagaactcgaaaggtgcccccaacaactcctgctctgagataaaaatgaacaagaaaggcgctagaattgattttaaagatgtgacttacttaacagaagagaaggtatatgaaattcttgaattatgtagagaaagagaggattattcccctttaatccgtgttattggaagagttttttctagtgctgaggcattggtacagagcttccggaaagttaaacaacacaccaaggaagaactgaaatctcttcaagcaaaagatgaagacaaagatgaagatgaaaaggaaaaagctgcatgttctgctgctgctatggaagaagactcagaagcatcttcctcaaggataggtgatagctcacagggagacaacaatttgcaaaaattaggccctgatgatgtgtctgtggatattgatgccattagaagggtctacaccagattgctctctaatgaaaaaattgaaactgcctttctcaatgcacttgtatatttgtcacctaacgtggaatgtgacttgacgtatcacaatgtatactctcgagatcctaattatctgaatttgttcattatcgtaatggagaatagaaatctccacagtcctgaatatctggaaatggctttgccattattttgcaaagcgatgagcaagctaccccttgcagcccaaggaaaactgatcagactgtggtctaaatacaatgcagaccagattcggagaatgatggagacatttcagcaacttattacttataaagtcataagcaatgaatttaacagtcgaaatctagtgaatgatgatgatgccattgttgctgcttcgaagtgcttgaaaatggtttactatgcaaatgtagtgggaggggaagtggacacaaatcacaatgaagaagatgatgaagagcccatccctgagtccagcgagctgacacttcaggaacttttgggagaagaaagaagaaacaagaaaggtcctcgagtggaccccctggaaactgaacttggtgttaaaaccctggattgtcgaaaaccacttatcccttttgaagagtttattaatgaaccactgaatgaggttctagaaatggataaagattatacttttttcaaagtagaaacagagaacaaattctcttttatgacatgtccctttatattgaatgctgtcacaaagaatttgggattatattatgacaatagaattcgcatgtacagtgaacgaagaatcactgttctctacagcttagttcaaggacagcagttgaatccatatttgagactcaaagttagacgtgaccatatcatagatgatgcacttgtccggctagagatgatcgctatggaaaatcctgcagacttgaagaagcagttgtatgtggaatttgaaggagaacaaggagttgatgagggaggtgtttccaaagaattttttcagctggttgtggaggaaatcttcaatccagatattggtatgttcacatacgatgaatctacaaaattgttttggtttaatccatcttcttttgaaactgagggtcagtttactctgattggcatagtactgggtctggctatttacaataactgtatactggatgtacattttcccatggttgtctacaggaagctaatggggaaaaaaggaacttttcgtgacttgggagactctcacccagttctatatcagagtttaaaagatttattggagtatgaagggaatgtggaagatgacatgatgatcactttccagatatcacagacagatctttttggtaacccaatgatgtatgatctaaaggaaaatggtgataaaattccaattacaaatgaaaacaggaaggaatttgtcaatctttattctgactacattctcaataaatcagtagaaaaacagttcaaggcttttcggagaggttttcatatggtgaccaatgaatctcccttaaagtacttattcagaccagaagaaattgaattgcttatatgtggaagccggaatctagatttccaagcactagaagaaactacagaatatgacggtggctataccagggactctgttctgattagggagttctgggaaatcgttcattcatttacagatgaacagaaaagactcttcttgcagtttacaacgggcacagacagagcacctgtgggaggactaggaaaattaaagatgattatagccaaaaatggcccagacacagaaaggttacctacatctcatacttgctttaatgtgcttttacttccggaatactcaagcaaagaaaaacttaaagagagattgttgaaggccatcacgtatgccaaaggatttggcatgctgtaaaacaaaacaaaacaaaataaaacaaaaaaaaggaaggaaaaaaaaagaaaaaatttaaaaaattttaaaaatataacgagggataaatttttggtggtgatagtgtcccagtacaaaaaggctgtaagatagtcaaccacagtagtcacctatgtctgtgcctcccttctttattggggacatgtgggctggaacagcagatttcagctacatatatgaacaaatcctttattattattataattatttttttgcgtgaaagtgttacatattctttcacttgtatgtacagagaggtttttctgaatatttattttaagggttaaatcacttttgcttgtgtttattactgcttgaggttgagccttttgagtatttaaaaaatatataccaacagaactactctcccaaggaaaatattgccaccatttgtagaccacgtaaccttcaagtatgtgctacttttttgtccctgtatctaactcaaatcaggaactgtattttttttaatgatttgcttttgaaacttgaagtcttgaaaacagtgtgatgcaattactgctgttctagcccccaaagagttttctgtgcaaaatcttgagaatcaatcaataaagaaagatggaaggaagggagaaattggaatgttttaactgcagccctcagaactttagtaacagcacaacaaattaaaaacaaaaacaactcatgccacagtatgtcgtcttcatgtgtcttgcaatgaactgtttcagtagccaatcctctttcttagtatatgaaaggacagggatttttgttcttgttgttctcgttgttgttttaagtttactggggaaagtgcatttggccaaatgaaatggtagtcaagcctattgcaacaaagttaggaagtttgttgtttgtttattataaacaaaaagcatgtgaaagtgcacttaagatagagtttttattaattacttacttattacctagattttaaatagacaatccaaagtctccccttcgtgttgccatcatcttgttgaatcagccattttatcgaggcacgtgatcagtgttgcaacataatgaaaaagatggctactgtgccttgtgttacttaatcatacagtaagctgacctggaaatgaatgaaactattactcctaagaattacattgtatagccccacagattaaatttaattaattaattcaaaacatgttaaacgttactttcatgtactatggaaaagtacaagtaggtttacattactgatttccagaagtaagtagtttcccctttcctagtcttctgtgtatgtgatgttgttaatttcttttattgcattataaaataaaaggattatgtatttttaactaaggtgagacattgatatatccttttgctacaagctatagctaatgtgctgagcttgtgccttggtgattgattgattgattgactgattgttttaactgattactgtagatcaacctgatgatttgtttgtttgaaattggcaggaaaaatgcagctttcaaatcattggggggagaaaaaggatgtctttcaggattattttaattaatttttttcataattgagacagaactgtttgttatgtaccataatgctaaataaaactgtggcacttttcaccataatttaatttagtggaaaaagaagacaatgctttccatattgtgataaggtaacatggggtttttctgggccagcctttagaacactgttagggtacatacgctaccttgatgaaagggaccttcgtgcaactgtagtcatcttaaaggcttctcatccactgtgcttcttaatgtgtaattaaagtgaggagaaattaaatactctgagggcgttttatataataaattcgtgaagaaatgtgtgctcttca

SEQ ID NO: 694 - DNA, 5515 bp, Homo sapiens
  source 1..5515: mol_type = genomic DNA
gctgcctgccgggatactcggcccgcccagccagtcctcccgtcttgcgccgcggccgcgagatccgtgtgtctcccaagatggtggcgctgggctcggggtgactacaggagacgacggggccttttcccttcgccaggacccgacacaccaggcttcgctcgctcgcgcacccctccgccgcgtagccatccgccagcgcgggcgcccgccatccgccgcctacttacgcttcacctctgccgacccggcgcgctcggctgcgggcggcggcgcctccttcggctcctcctcggaatagctcgcggcctgtagcccctggcaggagggcccctcagccccccggtgtggacaggcagcggcggctggcgacgaacgccgggatttcggcggccccggcgctccctttcccggcctcgttttccggataaggaagcgcgggtcccgcatgagccccggcggtggcggcagcgaaagagaacgaggcggtggcgggcggaggcggcgggcgagggcgactacgaccagtgaggcggccgccgcagcccaggcgcgggggcgacgacaggttaaaaatctgtaagagcctgattttagaattcaccagctcctcagaagtttggcgaaatatgagttattaagcctacgctcagatcaaggtagcagctagactggtgtgacaacctgtttttaatcagtgactcaaagctgtgatcaccctgatgtcaccgaatggccacagcttgtaaaagagagttacagtggaggtaaaaggagtggcttgcaggatggagaagctgcaccagtgttattggaatgccagcaggtttattttttgttttgcaagccagctctgcctccttacagtatgacatctgatgctggagggtcgcactttcaaaaatgagtcagctggtacatggggttatcatcaatttttagctcttctgtctgggagatacaagtttggaagcaatcttggggtacttacccacaaggctggtggagaccagatcaggagaacctcagtctgacgacattgaagctagccgaatgaagcgagcagctgcaaagcatctaatagaacgctactaccaccagttaactgagggctgtggaaatgaagcctgcacgaatgagttttgtgcttcctgtccaacttttcttcgtatggataataatgcagcagctattaaagccctcgagctttataagattaatgcaaaactctgtgatcctcatccctccaagaaaggagcaagctcagcttaccttgagaactcgaaaggtgcccccaacaactcctgctctgagataaaaatgaacaagaaaggcgctagaattgattttaaagatgtgacttacttaacagaagagaaggtatatgaaattcttgaattatgtagagaaagagaggattattcccctttaatccgtgttattggaagagttttttctagtgctgaggcattggtacagagcttccggaaagttaaacaacacaccaaggaagaactgaaatctcttcaagcaaaagatgaagacaaagatgaagatgaaaaggaaaaagctgcatgttctgctgctgctatggaagaagactcagaagcatcttcctcaaggataggtgatagctcacagggagacaacaatttgcaaaaattaggccctgatgatgtgtctgtggatattgatgccattagaagggtctacaccagattgctctctaatgaaaaaattgaaactgcctttctcaatgcacttgtatatttgtcacctaacgtggaatgtgacttgacgtatcacaatgtatactctcgagatcctaattatctgaatttgttcattatcgtaatggagaatagaaatctccacagtcctgaatatctggaaatggctttgccattattttgcaaagcgatgagcaagctaccccttgcagcccaaggaaaactgatcagactgtggtctaaatacaatgcagaccagattcggagaatgatggagacatttcagcaacttattacttataaagtcataagcaatgaatttaacagtcgaaatctagtgaatgatgatgatgccattgttgctgcttcgaagtgcttgaaaatggtttactatgcaaatgtagtgggaggggaagtggacacaaatcacaatgaagaagatgatgaagagcccatccctgagtccagcgagctgacacttcaggaacttttgggagaagaaagaagaaacaagaaaggtcctcgagtggaccccctggaaactgaacttggtgttaaaaccctggattgtcgaaaaccacttatcccttttgaagagtttattaatgaaccactgaatgaggttctagaaatggataaagattatacttttttcaaagtagaaacagagaacaaattctcttttatgacatgtccctttatattgaatgctgtcacaaagaatttgggattatattatgacaatagaattcgcatgtacagtgaacgaagaatcactgttctctacagcttagttcaaggacagcagttgaatccatatttgagactcaaagttagacgtgaccatatcatagatgatgcacttgtccggctagagatgatcgctatggaaaatcctgcagacttgaagaagcagttgtatgtggaatttgaaggagaacaaggagttgatgagggaggtgtttccaaagaattttttcagctggttgtggaggaaatcttcaatccagatattggtatgttcacatacgatgaatctacaaaattgttttggtttaatccatcttcttttgaaactgagggtcagtttactctgattggcatagtactgggtctggctatttacaataactgtatactggatgtacattttcccatggttgtctacaggaagctaatggggaaaaaaggaacttttcgtgacttgggagactctcacccagttctatatcagagtttaaaagatttattggagtatgaagggaatgtggaagatgacatgatgatcactttccagatatcacagacagatctttttggtaacccaatgatgtatgatctaaaggaaaatggtgataaaattccaattacaaatgaaaacaggaaggaatttgtcaatctttattctgactacattctcaataaatcagtagaaaaacagttcaaggcttttcggagaggttttcatatggtgaccaatgaatctcccttaaagtacttattcagaccagaagaaattgaattgcttatatgtggaagccggaatctagatttccaagcactagaagaaactacagaatatgacggtggctataccagggactctgttctgattagggagttctgggaaatcgttcattcatttacagatgaacagaaaagactcttcttgcagtttacaacgggcacagacagagcacctgtgggaggactaggaaaattaaagatgattatagccaaaaatggcccagacacagaaaggttacctacatctcatacttgctttaatgtgcttttacttccggaatactcaagcaaagaaaaacttaaagagagattgttgaaggccatcacgtatgccaaaggatttggcatgctgtaaaacaaaacaaaacaaaataaaacaaaaaaaaggaaggaaaaaaaaagaaaaaatttaaaaaattttaaaaatataacgagggataaatttttggtggtgatagtgtcccagtacaaaaaggctgtaagatagtcaaccacagtagtcacctatgtctgtgcctcccttctttattggggacatgtgggctggaacagcagatttcagctacatatatgaacaaatcctttattattattataattatttttttgcgtgaaagtgttacatattctttcacttgtatgtacagagaggtttttctgaatatttattttaagggttaaatcacttttgcttgtgtttattactgcttgaggttgagccttttgagtatttaaaaaatatataccaacagaactactctcccaaggaaaatattgccaccatttgtagaccacgtaaccttcaagtatgtgctacttttttgtccctgtatctaactcaaatcaggaactgtattttttttaatgatttgcttttgaaacttgaagtcttgaaaacagtgtgatgcaattactgctgttctagcccccaaagagttttctgtgcaaaatcttgagaatcaatcaataaagaaagatggaaggaagggagaaattggaatgttttaactgcagccctcagaactttagtaacagcacaacaaattaaaaacaaaaacaactcatgccacagtatgtcgtcttcatgtgtcttgcaatgaactgtttcagtagccaatcctctttcttagtatatgaaaggacagggatttttgttcttgttgttctcgttgttgttttaagtttactggggaaagtgcatttggccaaatgaaatggtagtcaagcctattgcaacaaagttaggaagtttgttgtttgtttattataaacaaaaagcatgtgaaagtgcacttaagatagagtttttattaattacttacttattacctagattttaaatagacaatccaaagtctccccttcgtgttgccatcatcttgttgaatcagccattttatcgaggcacgtgatcagtgttgcaacataatgaaaaagatggctactgtgccttgtgttacttaatcatacagtaagctgacctggaaatgaatgaaactattactcctaagaattacattgtatagccccacagattaaatttaattaattaattcaaaacatgttaaacgttactttcatgtactatggaaaagtacaagtaggtttacattactgatttccagaagtaagtagtttcccctttcctagtcttctgtgtatgtgatgttgttaatttcttttattgcattataaaataaaaggattatgtatttttaactaaggtgagacattgatatatccttttgctacaagctatagctaatgtgctgagcttgtgccttggtgattgattgattgattgactgattgttttaactgattactgtagatcaacctgatgatttgtttgtttgaaattggcaggaaaaatgcagctttcaaatcattggggggagaaaaaggatgtctttcaggattattttaattaatttttttcataattgagacagaactgtttgttatgtaccataatgctaaataaaactgtggcacttttcaccataatttaatttagtggaaaaagaagacaatgctttccatattgtgataaggtaacatggggtttttctgggccagcctttagaacactgttagggtacatacgctaccttgatgaaagggaccttcgtgcaactgtagtcatcttaaaggcttctcatccactgtgcttcttaatgtgtaattaaagtgaggagaaattaaatactctgagggcgttttatataataaattcgtgaagaaatgtgtgctcttca

SEQ ID NO: 695 - DNA, 5563 bp, Homo sapiens
  source 1..5563: mol_type = genomic DNA
gctgcctgccgggatactcggcccgcccagccagtcctcccgtcttgcgccgcggccgcgagatccgtgtgtctcccaagatggtggcgctgggctcggggtgactacaggagacgacggggccttttcccttcgccaggacccgacacaccaggcttcgctcgctcgcgcacccctccgccgcgtagccatccgccagcgcgggcgcccgccatccgccgcctacttacgcttcacctctgccgacccggcgcgctcggctgcgggcggcggcgcctccttcggctcctcctcggaatagctcgcggcctgtagcccctggcaggagggcccctcagccccccggtgtggacaggcagcggcggctggcgacgaacgccgggatttcggcggccccggcgctccctttcccggcctcgttttccggataaggaagcgcgggtcccgcatgagccccggcggtggcggcagcgaaagagaacgaggcggtggcgggcggaggcggcgggcgagggcgactacgaccagtgaggcggccgccgcagcccaggcgcgggggcgacgacaggttaaaaatctgtaagagcctgattttagaattcaccagctcctcagaagtttggcgaaatatgagttattaagcctacgctcagatcaaggtagcagctagactggtgtgacaacctgtttttaatcagtgactcaaagctgtgatcaccctgatgtcaccgaatggccacagcttgtaaaagagagttacagtggaggtaaaaggagtggcttgcaggatggagaagctgcaccagtgttattggaagtgagccaccatttgaatttgctagctcatgctgcagtattcagattatgccagcaggtttattttttgttttgcaagccagctctgcctccttacagtatgacatctgatgctggagggtcgcactttcaaaaatgagtcagctggtacatggggttatcatcaatttttagctcttctgtctgggagatacaagtttggaagcaatcttggggtacttacccacaaggctggtggagaccagatcaggagaacctcagtctgacgacattgaagctagccgaatgaagcgagcagctgcaaagcatctaatagaacgctactaccaccagttaactgagggctgtggaaatgaagcctgcacgaatgagttttgtgcttcctgtccaacttttcttcgtatggataataatgcagcagctattaaagccctcgagctttataagattaatgcaaaactctgtgatcctcatccctccaagaaaggagcaagctcagcttaccttgagaactcgaaaggtgcccccaacaactcctgctctgagataaaaatgaacaagaaaggcgctagaattgattttaaagatgtgacttacttaacagaagagaaggtatatgaaattcttgaattatgtagagaaagagaggattattcccctttaatccgtgttattggaagagttttttctagtgctgaggcattggtacagagcttccggaaagttaaacaacacaccaaggaagaactgaaatctcttcaagcaaaagatgaagacaaagatgaagatgaaaaggaaaaagctgcatgttctgctgctgctatggaagaagactcagaagcatcttcctcaaggataggtgatagctcacagggagacaacaatttgcaaaaattaggccctgatgatgtgtctgtggatattgatgccattagaagggtctacaccagattgctctctaatgaaaaaattgaaactgcctttctcaatgcacttgtatatttgtcacctaacgtggaatgtgacttgacgtatcacaatgtatactctcgagatcctaattatctgaatttgttcattatcgtaatggagaatagaaatctccacagtcctgaatatctggaaatggctttgccattattttgcaaagcgatgagcaagctaccccttgcagcccaaggaaaactgatcagactgtggtctaaatacaatgcagaccagattcggagaatgatggagacatttcagcaacttattacttataaagtcataagcaatgaatttaacagtcgaaatctagtgaatgatgatgatgccattgttgctgcttcgaagtgcttgaaaatggtttactatgcaaatgtagtgggaggggaagtggacacaaatcacaatgaagaagatgatgaagagcccatccctgagtccagcgagctgacacttcaggaacttttgggagaagaaagaagaaacaagaaaggtcctcgagtggaccccctggaaactgaacttggtgttaaaaccctggattgtcgaaaaccacttatcccttttgaagagtttattaatgaaccactgaatgaggttctagaaatggataaagattatacttttttcaaagtagaaacagagaacaaattctcttttatgacatgtccctttatattgaatgctgtcacaaagaatttgggattatattatgacaatagaattcgcatgtacagtgaacgaagaatcactgttctctacagcttagttcaaggacagcagttgaatccatatttgagactcaaagttagacgtgaccatatcatagatgatgcacttgtccggctagagatgatcgctatggaaaatcctgcagacttgaagaagcagttgtatgtggaatttgaaggagaacaaggagttgatgagggaggtgtttccaaagaattttttcagctggttgtggaggaaatcttcaatccagatattggtatgttcacatacgatgaatctacaaaattgttttggtttaatccatcttcttttgaaactgagggtcagtttactctgattggcatagtactgggtctggctatttacaataactgtatactggatgtacattttcccatggttgtctacaggaagctaatggggaaaaaaggaacttttcgtgacttgggagactctcacccagttctatatcagagtttaaaagatttattggagtatgaagggaatgtggaagatgacatgatgatcactttccagatatcacagacagatctttttggtaacccaatgatgtatgatctaaaggaaaatggtgataaaattccaattacaaatgaaaacaggaaggaatttgtcaatctttattctgactacattctcaataaatcagtagaaaaacagttcaaggcttttcggagaggttttcatatggtgaccaatgaatctcccttaaagtacttattcagaccagaagaaattgaattgcttatatgtggaagccggaatctagatttccaagcactagaagaaactacagaatatgacggtggctataccagggactctgttctgattagggagttctgggaaatcgttcattcatttacagatgaacagaaaagactcttcttgcagtttacaacgggcacagacagagcacctgtgggaggactaggaaaattaaagatgattatagccaaaaatggcccagacacagaaaggttacctacatctcatacttgctttaatgtgcttttacttccggaatactcaagcaaagaaaaacttaaagagagattgttgaaggccatcacgtatgccaaaggatttggcatgctgtaaaacaaaacaaaacaaaataaaacaaaaaaaaggaaggaaaaaaaaagaaaaaatttaaaaaattttaaaaatataacgagggataaatttttggtggtgatagtgtcccagtacaaaaaggctgtaagatagtcaaccacagtagtcacctatgtctgtgcctcccttctttattggggacatgtgggctggaacagcagatttcagctacatatatgaacaaatcctttattattattataattatttttttgcgtgaaagtgttacatattctttcacttgtatgtacagagaggtttttctgaatatttattttaagggttaaatcacttttgcttgtgtttattactgcttgaggttgagccttttgagtatttaaaaaatatataccaacagaactactctcccaaggaaaatattgccaccatttgtagaccacgtaaccttcaagtatgtgctacttttttgtccctgtatctaactcaaatcaggaactgtattttttttaatgatttgcttttgaaacttgaagtcttgaaaacagtgtgatgcaattactgctgttctagcccccaaagagttttctgtgcaaaatcttgagaatcaatcaataaagaaagatggaaggaagggagaaattggaatgttttaactgcagccctcagaactttagtaacagcacaacaaattaaaaacaaaaacaactcatgccacagtatgtcgtcttcatgtgtcttgcaatgaactgtttcagtagccaatcctctttcttagtatatgaaaggacagggatttttgttcttgttgttctcgttgttgttttaagtttactggggaaagtgcatttggccaaatgaaatggtagtcaagcctattgcaacaaagttaggaagtttgttgtttgtttattataaacaaaaagcatgtgaaagtgcacttaagatagagtttttattaattacttacttattacctagattttaaatagacaatccaaagtctccccttcgtgttgccatcatcttgttgaatcagccattttatcgaggcacgtgatcagtgttgcaacataatgaaaaagatggctactgtgccttgtgttacttaatcatacagtaagctgacctggaaatgaatgaaactattactcctaagaattacattgtatagccccacagattaaatttaattaattaattcaaaacatgttaaacgttactttcatgtactatggaaaagtacaagtaggtttacattactgatttccagaagtaagtagtttcccctttcctagtcttctgtgtatgtgatgttgttaatttcttttattgcattataaaataaaaggattatgtatttttaactaaggtgagacattgatatatccttttgctacaagctatagctaatgtgctgagcttgtgccttggtgattgattgattgattgactgattgttttaactgattactgtagatcaacctgatgatttgtttgtttgaaattggcaggaaaaatgcagctttcaaatcattggggggagaaaaaggatgtctttcaggattattttaattaatttttttcataattgagacagaactgtttgttatgtaccataatgctaaataaaactgtggcacttttcaccataatttaatttagtggaaaaagaagacaatgctttccatattgtgataaggtaacatggggtttttctgggccagcctttagaacactgttagggtacatacgctaccttgatgaaagggaccttcgtgcaactgtagtcatcttaaaggcttctcatccactgtgcttcttaatgtgtaattaaagtgaggagaaattaaatactctgagggcgttttatataataaattcgtgaagaaatgtgtgctcttca

SEQ ID NO: 696 - DNA, 5680 bp, Homo sapiens
  source 1..5680: mol_type = genomic DNA
gctgcctgccgggatactcggcccgcccagccagtcctcccgtcttgcgccgcggccgcgagatccgtgtgtctcccaagatggtggcgctgggctcggggtgactacaggagacgacggggccttttcccttcgccaggacccgacacaccaggcttcgctcgctcgcgcacccctccgccgcgtagccatccgccagcgcgggcgcccgccatccgccgcctacttacgcttcacctctgccgacccggcgcgctcggctgcgggcggcggcgcctccttcggctcctcctcggaatagctcgcggcctgtagcccctggcaggagggcccctcagccccccggtgtggacaggcagcggcggctggcgacgaacgccgggatttcggcggccccggcgctccctttcccggcctcgttttccggataaggaagcgcgggtcccgcatgagccccggcggtggcggcagcgaaagagaacgaggcggtggcgggcggaggcggcgggcgagggcgactacgaccagtgaggcggccgccgcagcccaggcgcgggggcgacgacagagactgccatactgttttccacagtgactgcaccattttacattcccaccagcagtgaataagggttccaatttctctgcatcttttctaacacttgaggggaggtatggtgtcaagaaaacatagtcaccattattacgaaaagtaaaatatggaagagatgatccctaccatcaatcagcttacaactagaggcactgacaaatgtatacagatagctgtaatgtaaggttaaaaatctgtaagagcctgattttagaattcaccagctcctcagaagtttggcgaaatatgagttattaagcctacgctcagatcaaggtagcagctagactggtgtgacaacctgtttttaatcagtgactcaaagctgtgatcaccctgatgtcaccgaatggccacagcttgtaaaagtgccagcaggtttattttttgttttgcaagccagctctgcctccttacagtatgacatctgatgctggagggtcgcactttcaaaaatgagtcagctggtacatggggttatcatcaatttttagctcttctgtctgggagatacaagtttggaagcaatcttggggtacttacccacaaggctggtggagaccagatcaggagaacctcagtctgacgacattgaagctagccgaatgaagcgagcagctgcaaagcatctaatagaacgctactaccaccagttaactgagggctgtggaaatgaagcctgcacgaatgagttttgtgcttcctgtccaacttttcttcgtatggataataatgcagcagctattaaagccctcgagctttataagattaatgcaaaactctgtgatcctcatccctccaagaaaggagcaagctcagcttaccttgagaactcgaaaggtgcccccaacaactcctgctctgagataaaaatgaacaagaaaggcgctagaattgattttaaagatgtgacttacttaacagaagagaaggtatatgaaattcttgaattatgtagagaaagagaggattattcccctttaatccgtgttattggaagagttttttctagtgctgaggcattggtacagagcttccggaaagttaaacaacacaccaaggaagaactgaaatctcttcaagcaaaagatgaagacaaagatgaagatgaaaaggaaaaagctgcatgttctgctgctgctatggaagaagactcagaagcatcttcctcaaggataggtgatagctcacagggagacaacaatttgcaaaaattaggccctgatgatgtgtctgtggatattgatgccattagaagggtctacaccagattgctctctaatgaaaaaattgaaactgcctttctcaatgcacttgtatatttgtcacctaacgtggaatgtgacttgacgtatcacaatgtatactctcgagatcctaattatctgaatttgttcattatcgtaatggagaatagaaatctccacagtcctgaatatctggaaatggctttgccattattttgcaaagcgatgagcaagctaccccttgcagcccaaggaaaactgatcagactgtggtctaaatacaatgcagaccagattcggagaatgatggagacatttcagcaacttattacttataaagtcataagcaatgaatttaacagtcgaaatctagtgaatgatgatgatgccattgttgctgcttcgaagtgcttgaaaatggtttactatgcaaatgtagtgggaggggaagtggacacaaatcacaatgaagaagatgatgaagagcccatccctgagtccagcgagctgacacttcaggaacttttgggagaagaaagaagaaacaagaaaggtcctcgagtggaccccctggaaactgaacttggtgttaaaaccctggattgtcgaaaaccacttatcccttttgaagagtttattaatgaaccactgaatgaggttctagaaatggataaagattatacttttttcaaagtagaaacagagaacaaattctcttttatgacatgtccctttatattgaatgctgtcacaaagaatttgggattatattatgacaatagaattcgcatgtacagtgaacgaagaatcactgttctctacagcttagttcaaggacagcagttgaatccatatttgagactcaaagttagacgtgaccatatcatagatgatgcacttgtccggctagagatgatcgctatggaaaatcctgcagacttgaagaagcagttgtatgtggaatttgaaggagaacaaggagttgatgagggaggtgtttccaaagaattttttcagctggttgtggaggaaatcttcaatccagatattggtatgttcacatacgatgaatctacaaaattgttttggtttaatccatcttcttttgaaactgagggtcagtttactctgattggcatagtactgggtctggctatttacaataactgtatactggatgtacattttcccatggttgtctacaggaagctaatggggaaaaaaggaacttttcgtgacttgggagactctcacccagttctatatcagagtttaaaagatttattggagtatgaagggaatgtggaagatgacatgatgatcactttccagatatcacagacagatctttttggtaacccaatgatgtatgatctaaaggaaaatggtgataaaattccaattacaaatgaaaacaggaaggaatttgtcaatctttattctgactacattctcaataaatcagtagaaaaacagttcaaggcttttcggagaggttttcatatggtgaccaatgaatctcccttaaagtacttattcagaccagaagaaattgaattgcttatatgtggaagccggaatctagatttccaagcactagaagaaactacagaatatgacggtggctataccagggactctgttctgattagggagttctgggaaatcgttcattcatttacagatgaacagaaaagactcttcttgcagtttacaacgggcacagacagagcacctgtgggaggactaggaaaattaaagatgattatagccaaaaatggcccagacacagaaaggttacctacatctcatacttgctttaatgtgcttttacttccggaatactcaagcaaagaaaaacttaaagagagattgttgaaggccatcacgtatgccaaaggatttggcatgctgtaaaacaaaacaaaacaaaataaaacaaaaaaaaggaaggaaaaaaaaagaaaaaatttaaaaaattttaaaaatataacgagggataaatttttggtggtgatagtgtcccagtacaaaaaggctgtaagatagtcaaccacagtagtcacctatgtctgtgcctcccttctttattggggacatgtgggctggaacagcagatttcagctacatatatgaacaaatcctttattattattataattatttttttgcgtgaaagtgttacatattctttcacttgtatgtacagagaggtttttctgaatatttattttaagggttaaatcacttttgcttgtgtttattactgcttgaggttgagccttttgagtatttaaaaaatatataccaacagaactactctcccaaggaaaatattgccaccatttgtagaccacgtaaccttcaagtatgtgctacttttttgtccctgtatctaactcaaatcaggaactgtattttttttaatgatttgcttttgaaacttgaagtcttgaaaacagtgtgatgcaattactgctgttctagcccccaaagagttttctgtgcaaaatcttgagaatcaatcaataaagaaagatggaaggaagggagaaattggaatgttttaactgcagccctcagaactttagtaacagcacaacaaattaaaaacaaaaacaactcatgccacagtatgtcgtcttcatgtgtcttgcaatgaactgtttcagtagccaatcctctttcttagtatatgaaaggacagggatttttgttcttgttgttctcgttgttgttttaagtttactggggaaagtgcatttggccaaatgaaatggtagtcaagcctattgcaacaaagttaggaagtttgttgtttgtttattataaacaaaaagcatgtgaaagtgcacttaagatagagtttttattaattacttacttattacctagattttaaatagacaatccaaagtctccccttcgtgttgccatcatcttgttgaatcagccattttatcgaggcacgtgatcagtgttgcaacataatgaaaaagatggctactgtgccttgtgttacttaatcatacagtaagctgacctggaaatgaatgaaactattactcctaagaattacattgtatagccccacagattaaatttaattaattaattcaaaacatgttaaacgttactttcatgtactatggaaaagtacaagtaggtttacattactgatttccagaagtaagtagtttcccctttcctagtcttctgtgtatgtgatgttgttaatttcttttattgcattataaaataaaaggattatgtatttttaactaaggtgagacattgatatatccttttgctacaagctatagctaatgtgctgagcttgtgccttggtgattgattgattgattgactgattgttttaactgattactgtagatcaacctgatgatttgtttgtttgaaattggcaggaaaaatgcagctttcaaatcattggggggagaaaaaggatgtctttcaggattattttaattaatttttttcataattgagacagaactgtttgttatgtaccataatgctaaataaaactgtggcacttttcaccataatttaatttagtggaaaaagaagacaatgctttccatattgtgataaggtaacatggggtttttctgggccagcctttagaacactgttagggtacatacgctaccttgatgaaagggaccttcgtgcaactgtagtcatcttaaaggcttctcatccactgtgcttcttaatgtgtaattaaagtgaggagaaattaaatactctgagggcgttttatataataaattcgtgaagaaatgtgtgctcttca

SEQ ID NO: 697 - DNA, 5695 bp, Homo sapiens
  source 1..5695: mol_type = genomic DNA
gctgcctgccgggatactcggcccgcccagccagtcctcccgtcttgcgccgcggccgcgagatccgtgtgtctcccaagatggtggcgctgggctcggggtgactacaggagacgacggggccttttcccttcgccaggacccgacacaccaggcttcgctcgctcgcgcacccctccgccgcgtagccatccgccagcgcgggcgcccgccatccgccgcctacttacgcttcacctctgccgacccggcgcgctcggctgcgggcggcggcgcctccttcggctcctcctcggaatagctcgcggcctgtagcccctggcaggagggcccctcagccccccggtgtggacaggcagcggcggctggcgacgaacgccgggatttcggcggccccggcgctccctttcccggcctcgttttccggataaggaagcgcgggtcccgcatgagccccggcggtggcggcagcgaaagagaacgaggcggtggcgggcggaggcggcgggcgagggcgactacgaccagtgaggcggccgccgcagcccaggcgcgggggcgacgacagagactgccatactgttttccacagtgactgcaccattttacattcccaccagcagtgaataagggttccaatttctctgcatcttttctaacacttgaggggaggtatggtgtcaagaaaacatagtcaccattattacgaaaagtaaaatatggaagagatgatccctaccatcaatcagcttacaactagaggcactgacaaatgtatacagatagctgtaatgtaaggttaaaaatctgtaagagcctgattttagaattcaccagctcctcagaagtttggcgaaatatgagttattaagcctacgctcagatcaaggtagcagctagactggtgtgacaacctgtttttaatcagtgactcaaagctgtgatcaccctgatgtcaccgaatggccacagcttgtaaaagagagttacagtggaggtaaaaggagtggcttgcaggatggagaagctgcaccagtgttattggaatatgacatctgatgctggagggtcgcactttcaaaaatgagtcagctggtacatggggttatcatcaatttttagctcttctgtctgggagatacaagtttggaagcaatcttggggtacttacccacaaggctggtggagaccagatcaggagaacctcagtctgacgacattgaagctagccgaatgaagcgagcagctgcaaagcatctaatagaacgctactaccaccagttaactgagggctgtggaaatgaagcctgcacgaatgagttttgtgcttcctgtccaacttttcttcgtatggataataatgcagcagctattaaagccctcgagctttataagattaatgcaaaactctgtgatcctcatccctccaagaaaggagcaagctcagcttaccttgagaactcgaaaggtgcccccaacaactcctgctctgagataaaaatgaacaagaaaggcgctagaattgattttaaagatgtgacttacttaacagaagagaaggtatatgaaattcttgaattatgtagagaaagagaggattattcccctttaatccgtgttattggaagagttttttctagtgctgaggcattggtacagagcttccggaaagttaaacaacacaccaaggaagaactgaaatctcttcaagcaaaagatgaagacaaagatgaagatgaaaaggaaaaagctgcatgttctgctgctgctatggaagaagactcagaagcatcttcctcaaggataggtgatagctcacagggagacaacaatttgcaaaaattaggccctgatgatgtgtctgtggatattgatgccattagaagggtctacaccagattgctctctaatgaaaaaattgaaactgcctttctcaatgcacttgtatatttgtcacctaacgtggaatgtgacttgacgtatcacaatgtatactctcgagatcctaattatctgaatttgttcattatcgtaatggagaatagaaatctccacagtcctgaatatctggaaatggctttgccattattttgcaaagcgatgagcaagctaccccttgcagcccaaggaaaactgatcagactgtggtctaaatacaatgcagaccagattcggagaatgatggagacatttcagcaacttattacttataaagtcataagcaatgaatttaacagtcgaaatctagtgaatgatgatgatgccattgttgctgcttcgaagtgcttgaaaatggtttactatgcaaatgtagtgggaggggaagtggacacaaatcacaatgaagaagatgatgaagagcccatccctgagtccagcgagctgacacttcaggaacttttgggagaagaaagaagaaacaagaaaggtcctcgagtggaccccctggaaactgaacttggtgttaaaaccctggattgtcgaaaaccacttatcccttttgaagagtttattaatgaaccactgaatgaggttctagaaatggataaagattatacttttttcaaagtagaaacagagaacaaattctcttttatgacatgtccctttatattgaatgctgtcacaaagaatttgggattatattatgacaatagaattcgcatgtacagtgaacgaagaatcactgttctctacagcttagttcaaggacagcagttgaatccatatttgagactcaaagttagacgtgaccatatcatagatgatgcacttgtccggctagagatgatcgctatggaaaatcctgcagacttgaagaagcagttgtatgtggaatttgaaggagaacaaggagttgatgagggaggtgtttccaaagaattttttcagctggttgtggaggaaatcttcaatccagatattggtatgttcacatacgatgaatctacaaaattgttttggtttaatccatcttcttttgaaactgagggtcagtttactctgattggcatagtactgggtctggctatttacaataactgtatactggatgtacattttcccatggttgtctacaggaagctaatggggaaaaaaggaacttttcgtgacttgggagactctcacccagttctatatcagagtttaaaagatttattggagtatgaagggaatgtggaagatgacatgatgatcactttccagatatcacagacagatctttttggtaacccaatgatgtatgatctaaaggaaaatggtgataaaattccaattacaaatgaaaacaggaaggaatttgtcaatctttattctgactacattctcaataaatcagtagaaaaacagttcaaggcttttcggagaggttttcatatggtgaccaatgaatctcccttaaagtacttattcagaccagaagaaattgaattgcttatatgtggaagccggaatctagatttccaagcactagaagaaactacagaatatgacggtggctataccagggactctgttctgattagggagttctgggaaatcgttcattcatttacagatgaacagaaaagactcttcttgcagtttacaacgggcacagacagagcacctgtgggaggactaggaaaattaaagatgattatagccaaaaatggcccagacacagaaaggttacctacatctcatacttgctttaatgtgcttttacttccggaatactcaagcaaagaaaaacttaaagagagattgttgaaggccatcacgtatgccaaaggatttggcatgctgtaaaacaaaacaaaacaaaataaaacaaaaaaaaggaaggaaaaaaaaagaaaaaatttaaaaaattttaaaaatataacgagggataaatttttggtggtgatagtgtcccagtacaaaaaggctgtaagatagtcaaccacagtagtcacctatgtctgtgcctcccttctttattggggacatgtgggctggaacagcagatttcagctacatatatgaacaaatcctttattattattataattatttttttgcgtgaaagtgttacatattctttcacttgtatgtacagagaggtttttctgaatatttattttaagggttaaatcacttttgcttgtgtttattactgcttgaggttgagccttttgagtatttaaaaaatatataccaacagaactactctcccaaggaaaatattgccaccatttgtagaccacgtaaccttcaagtatgtgctacttttttgtccctgtatctaactcaaatcaggaactgtattttttttaatgatttgcttttgaaacttgaagtcttgaaaacagtgtgatgcaattactgctgttctagcccccaaagagttttctgtgcaaaatcttgagaatcaatcaataaagaaagatggaaggaagggagaaattggaatgttttaactgcagccctcagaactttagtaacagcacaacaaattaaaaacaaaaacaactcatgccacagtatgtcgtcttcatgtgtcttgcaatgaactgtttcagtagccaatcctctttcttagtatatgaaaggacagggatttttgttcttgttgttctcgttgttgttttaagtttactggggaaagtgcatttggccaaatgaaatggtagtcaagcctattgcaacaaagttaggaagtttgttgtttgtttattataaacaaaaagcatgtgaaagtgcacttaagatagagtttttattaattacttacttattacctagattttaaatagacaatccaaagtctccccttcgtgttgccatcatcttgttgaatcagccattttatcgaggcacgtgatcagtgttgcaacataatgaaaaagatggctactgtgccttgtgttacttaatcatacagtaagctgacctggaaatgaatgaaactattactcctaagaattacattgtatagccccacagattaaatttaattaattaattcaaaacatgttaaacgttactttcatgtactatggaaaagtacaagtaggtttacattactgatttccagaagtaagtagtttcccctttcctagtcttctgtgtatgtgatgttgttaatttcttttattgcattataaaataaaaggattatgtatttttaactaaggtgagacattgatatatccttttgctacaagctatagctaatgtgctgagcttgtgccttggtgattgattgattgattgactgattgttttaactgattactgtagatcaacctgatgatttgtttgtttgaaattggcaggaaaaatgcagctttcaaatcattggggggagaaaaaggatgtctttcaggattattttaattaatttttttcataattgagacagaactgtttgttatgtaccataatgctaaataaaactgtggcacttttcaccataatttaatttagtggaaaaagaagacaatgctttccatattgtgataaggtaacatggggtttttctgggccagcctttagaacactgttagggtacatacgctaccttgatgaaagggaccttcgtgcaactgtagtcatcttaaaggcttctcatccactgtgcttcttaatgtgtaattaaagtgaggagaaattaaatactctgagggcgttttatataataaattcgtgaagaaatgtgtgctcttca

SEQ ID NO: 698 - DNA, 5290 bp, Homo sapiens
  source 1..5290: mol_type = genomic DNA
gctgcctgccgggatactcggcccgcccagccagtcctcccgtcttgcgccgcggccgcgagatccgtgtgtctcccaagatggtggcgctgggctcggggtgactacaggagacgacggggccttttcccttcgccaggacccgacacaccaggcttcgctcgctcgcgcacccctccgccgcgtagccatccgccagcgcgggcgcccgccatccgccgcctacttacgcttcacctctgccgacccggcgcgctcggctgcgggcggcggcgcctccttcggctcctcctcggaatagctcgcggcctgtagcccctggcaggagggcccctcagccccccggtgtggacaggcagcggcggctggcgacgaacgccgggatttcggcggccccggcgctccctttcccggcctcgttttccggataaggaagcgcgggtcccgcatgagccccggcggtggcggcagcgaaagagaacgaggcggtggcgggcggaggcggcgggcgagggcgactacgaccagtgaggcggccgccgcagcccaggcgcgggggcgacgacagggtaaataccttaaattggaattactgggtcacatggttaaaaatctgtaagagcctgattttagaattcaccagctcctcagaagtttggcgaaatatgagttattaagcctacgctcagatcaaggtagcagctagactggtgtgacaacctgtttttaatcagtgactcaaagctgtgatcaccctgatgtcaccgaatggccacagcttgtaaaagatcaggagaacctcagtctgacgacattgaagctagccgaatgaagcgagcagctgcaaagcatctaatagaacgctactaccaccagttaactgagggctgtggaaatgaagcctgcacgaatgagttttgtgcttcctgtccaacttttcttcgtatggataataatgcagcagctattaaagccctcgagctttataagattaatgcaaaactctgtgatcctcatccctccaagaaaggagcaagctcagcttaccttgagaactcgaaaggtgcccccaacaactcctgctctgagataaaaatgaacaagaaaggcgctagaattgattttaaagatgtgacttacttaacagaagagaaggtatatgaaattcttgaattatgtagagaaagagaggattattcccctttaatccgtgttattggaagagttttttctagtgctgaggcattggtacagagcttccggaaagttaaacaacacaccaaggaagaactgaaatctcttcaagcaaaagatgaagacaaagatgaagatgaaaaggaaaaagctgcatgttctgctgctgctatggaagaagactcagaagcatcttcctcaaggataggtgatagctcacagggagacaacaatttgcaaaaattaggccctgatgatgtgtctgtggatattgatgccattagaagggtctacaccagattgctctctaatgaaaaaattgaaactgcctttctcaatgcacttgtatatttgtcacctaacgtggaatgtgacttgacgtatcacaatgtatactctcgagatcctaattatctgaatttgttcattatcgtaatggagaatagaaatctccacagtcctgaatatctggaaatggctttgccattattttgcaaagcgatgagcaagctaccccttgcagcccaaggaaaactgatcagactgtggtctaaatacaatgcagaccagattcggagaatgatggagacatttcagcaacttattacttataaagtcataagcaatgaatttaacagtcgaaatctagtgaatgatgatgatgccattgttgctgcttcgaagtgcttgaaaatggtttactatgcaaatgtagtgggaggggaagtggacacaaatcacaatgaagaagatgatgaagagcccatccctgagtccagcgagctgacacttcaggaacttttgggagaagaaagaagaaacaagaaaggtcctcgagtggaccccctggaaactgaacttggtgttaaaaccctggattgtcgaaaaccacttatcccttttgaagagtttattaatgaaccactgaatgaggttctagaaatggataaagattatacttttttcaaagtagaaacagagaacaaattctcttttatgacatgtccctttatattgaatgctgtcacaaagaatttgggattatattatgacaatagaattcgcatgtacagtgaacgaagaatcactgttctctacagcttagttcaaggacagcagttgaatccatatttgagactcaaagttagacgtgaccatatcatagatgatgcacttgtccggctagagatgatcgctatggaaaatcctgcagacttgaagaagcagttgtatgtggaatttgaaggagaacaaggagttgatgagggaggtgtttccaaagaattttttcagctggttgtggaggaaatcttcaatccagatattggtatgttcacatacgatgaatctacaaaattgttttggtttaatccatcttcttttgaaactgagggtcagtttactctgattggcatagtactgggtctggctatttacaataactgtatactggatgtacattttcccatggttgtctacaggaagctaatggggaaaaaaggaacttttcgtgacttgggagactctcacccagttctatatcagagtttaaaagatttattggagtatgaagggaatgtggaagatgacatgatgatcactttccagatatcacagacagatctttttggtaacccaatgatgtatgatctaaaggaaaatggtgataaaattccaattacaaatgaaaacaggaaggaatttgtcaatctttattctgactacattctcaataaatcagtagaaaaacagttcaaggcttttcggagaggttttcatatggtgaccaatgaatctcccttaaagtacttattcagaccagaagaaattgaattgcttatatgtggaagccggaatctagatttccaagcactagaagaaactacagaatatgacggtggctataccagggactctgttctgattagggagttctgggaaatcgttcattcatttacagatgaacagaaaagactcttcttgcagtttacaacgggcacagacagagcacctgtgggaggactaggaaaattaaagatgattatagccaaaaatggcccagacacagaaaggttacctacatctcatacttgctttaatgtgcttttacttccggaatactcaagcaaagaaaaacttaaagagagattgttgaaggccatcacgtatgccaaaggatttggcatgctgtaaaacaaaacaaaacaaaataaaacaaaaaaaaggaaggaaaaaaaaagaaaaaatttaaaaaattttaaaaatataacgagggataaatttttggtggtgatagtgtcccagtacaaaaaggctgtaagatagtcaaccacagtagtcacctatgtctgtgcctcccttctttattggggacatgtgggctggaacagcagatttcagctacatatatgaacaaatcctttattattattataattatttttttgcgtgaaagtgttacatattctttcacttgtatgtacagagaggtttttctgaatatttattttaagggttaaatcacttttgcttgtgtttattactgcttgaggttgagccttttgagtatttaaaaaatatataccaacagaactactctcccaaggaaaatattgccaccatttgtagaccacgtaaccttcaagtatgtgctacttttttgtccctgtatctaactcaaatcaggaactgtattttttttaatgatttgcttttgaaacttgaagtcttgaaaacagtgtgatgcaattactgctgttctagcccccaaagagttttctgtgcaaaatcttgagaatcaatcaataaagaaagatggaaggaagggagaaattggaatgttttaactgcagccctcagaactttagtaacagcacaacaaattaaaaacaaaaacaactcatgccacagtatgtcgtcttcatgtgtcttgcaatgaactgtttcagtagccaatcctctttcttagtatatgaaaggacagggatttttgttcttgttgttctcgttgttgttttaagtttactggggaaagtgcatttggccaaatgaaatggtagtcaagcctattgcaacaaagttaggaagtttgttgtttgtttattataaacaaaaagcatgtgaaagtgcacttaagatagagtttttattaattacttacttattacctagattttaaatagacaatccaaagtctccccttcgtgttgccatcatcttgttgaatcagccattttatcgaggcacgtgatcagtgttgcaacataatgaaaaagatggctactgtgccttgtgttacttaatcatacagtaagctgacctggaaatgaatgaaactattactcctaagaattacattgtatagccccacagattaaatttaattaattaattcaaaacatgttaaacgttactttcatgtactatggaaaagtacaagtaggtttacattactgatttccagaagtaagtagtttcccctttcctagtcttctgtgtatgtgatgttgttaatttcttttattgcattataaaataaaaggattatgtatttttaactaaggtgagacattgatatatccttttgctacaagctatagctaatgtgctgagcttgtgccttggtgattgattgattgattgactgattgttttaactgattactgtagatcaacctgatgatttgtttgtttgaaattggcaggaaaaatgcagctttcaaatcattggggggagaaaaaggatgtctttcaggattattttaattaatttttttcataattgagacagaactgtttgttatgtaccataatgctaaataaaactgtggcacttttcaccataatttaatttagtggaaaaagaagacaatgctttccatattgtgataaggtaacatggggtttttctgggccagcctttagaacactgttagggtacatacgctaccttgatgaaagggaccttcgtgcaactgtagtcatcttaaaggcttctcatccactgtgcttcttaatgtgtaattaaagtgaggagaaattaaatactctgagggcgttttatataataaattcgtgaagaaatgtgtgctcttca

SEQ ID NO: 699 - DNA, 5486 bp, Homo sapiens
  source 1..5486: mol_type = genomic DNA
gctgcctgccgggatactcggcccgcccagccagtcctcccgtcttgcgccgcggccgcgagatccgtgtgtctcccaagatggtggcgctgggctcggggtgactacaggagacgacggggccttttcccttcgccaggacccgacacaccaggcttcgctcgctcgcgcacccctccgccgcgtagccatccgccagcgcgggcgcccgccatccgccgcctacttacgcttcacctctgccgacccggcgcgctcggctgcgggcggcggcgcctccttcggctcctcctcggaatagctcgcggcctgtagcccctggcaggagggcccctcagccccccggtgtggacaggcagcggcggctggcgacgaacgccgggatttcggcggccccggcgctccctttcccggcctcgttttccggataaggaagcgcgggtcccgcatgagccccggcggtggcggcagcgaaagagaacgaggcggtggcgggcggaggcggcgggcgagggcgactacgaccagtgaggcggccgccgcagcccaggcgcgggggcgacgacagggtaaataccttaaattggaattactgggtcacatggttaaaaatctgtaagagcctgattttagaattcaccagctcctcagaagtttggcgaaatatgagttattaagcctacgctcagatcaaggtagcagctagactggtgtgacaacctgtttttaatcagtgactcaaagctgtgatcaccctgatgtcaccgaatggccacagcttgtaaaagtgccagcaggtttattttttgttttgcaagccagctctgcctccttacagtatgacatctgatgctggagggtcgcactttcaaaaatgagtcagctggtacatggggttatcatcaatttttagctcttctgtctgggagatacaagtttggaagcaatcttggggtacttacccacaaggctggtggagaccagatcaggagaacctcagtctgacgacattgaagctagccgaatgaagcgagcagctgcaaagcatctaatagaacgctactaccaccagttaactgagggctgtggaaatgaagcctgcacgaatgagttttgtgcttcctgtccaacttttcttcgtatggataataatgcagcagctattaaagccctcgagctttataagattaatgcaaaactctgtgatcctcatccctccaagaaaggagcaagctcagcttaccttgagaactcgaaaggtgcccccaacaactcctgctctgagataaaaatgaacaagaaaggcgctagaattgattttaaagatgtgacttacttaacagaagagaaggtatatgaaattcttgaattatgtagagaaagagaggattattcccctttaatccgtgttattggaagagttttttctagtgctgaggcattggtacagagcttccggaaagttaaacaacacaccaaggaagaactgaaatctcttcaagcaaaagatgaagacaaagatgaagatgaaaaggaaaaagctgcatgttctgctgctgctatggaagaagactcagaagcatcttcctcaaggataggtgatagctcacagggagacaacaatttgcaaaaattaggccctgatgatgtgtctgtggatattgatgccattagaagggtctacaccagattgctctctaatgaaaaaattgaaactgcctttctcaatgcacttgtatatttgtcacctaacgtggaatgtgacttgacgtatcacaatgtatactctcgagatcctaattatctgaatttgttcattatcgtaatggagaatagaaatctccacagtcctgaatatctggaaatggctttgccattattttgcaaagcgatgagcaagctaccccttgcagcccaaggaaaactgatcagactgtggtctaaatacaatgcagaccagattcggagaatgatggagacatttcagcaacttattacttataaagtcataagcaatgaatttaacagtcgaaatctagtgaatgatgatgatgccattgttgctgcttcgaagtgcttgaaaatggtttactatgcaaatgtagtgggaggggaagtggacacaaatcacaatgaagaagatgatgaagagcccatccctgagtccagcgagctgacacttcaggaacttttgggagaagaaagaagaaacaagaaaggtcctcgagtggaccccctggaaactgaacttggtgttaaaaccctggattgtcgaaaaccacttatcccttttgaagagtttattaatgaaccactgaatgaggttctagaaatggataaagattatacttttttcaaagtagaaacagagaacaaattctcttttatgacatgtccctttatattgaatgctgtcacaaagaatttgggattatattatgacaatagaattcgcatgtacagtgaacgaagaatcactgttctctacagcttagttcaaggacagcagttgaatccatatttgagactcaaagttagacgtgaccatatcatagatgatgcacttgtccggctagagatgatcgctatggaaaatcctgcagacttgaagaagcagttgtatgtggaatttgaaggagaacaaggagttgatgagggaggtgtttccaaagaattttttcagctggttgtggaggaaatcttcaatccagatattggtatgttcacatacgatgaatctacaaaattgttttggtttaatccatcttcttttgaaactgagggtcagtttactctgattggcatagtactgggtctggctatttacaataactgtatactggatgtacattttcccatggttgtctacaggaagctaatggggaaaaaaggaacttttcgtgacttgggagactctcacccagttctatatcagagtttaaaagatttattggagtatgaagggaatgtggaagatgacatgatgatcactttccagatatcacagacagatctttttggtaacccaatgatgtatgatctaaaggaaaatggtgataaaattccaattacaaatgaaaacaggaaggaatttgtcaatctttattctgactacattctcaataaatcagtagaaaaacagttcaaggcttttcggagaggttttcatatggtgaccaatgaatctcccttaaagtacttattcagaccagaagaaattgaattgcttatatgtggaagccggaatctagatttccaagcactagaagaaactacagaatatgacggtggctataccagggactctgttctgattagggagttctgggaaatcgttcattcatttacagatgaacagaaaagactcttcttgcagtttacaacgggcacagacagagcacctgtgggaggactaggaaaattaaagatgattatagccaaaaatggcccagacacagaaaggttacctacatctcatacttgctttaatgtgcttttacttccggaatactcaagcaaagaaaaacttaaagagagattgttgaaggccatcacgtatgccaaaggatttggcatgctgtaaaacaaaacaaaacaaaataaaacaaaaaaaaggaaggaaaaaaaaagaaaaaatttaaaaaattttaaaaatataacgagggataaatttttggtggtgatagtgtcccagtacaaaaaggctgtaagatagtcaaccacagtagtcacctatgtctgtgcctcccttctttattggggacatgtgggctggaacagcagatttcagctacatatatgaacaaatcctttattattattataattatttttttgcgtgaaagtgttacatattctttcacttgtatgtacagagaggtttttctgaatatttattttaagggttaaatcacttttgcttgtgtttattactgcttgaggttgagccttttgagtatttaaaaaatatataccaacagaactactctcccaaggaaaatattgccaccatttgtagaccacgtaaccttcaagtatgtgctacttttttgtccctgtatctaactcaaatcaggaactgtattttttttaatgatttgcttttgaaacttgaagtcttgaaaacagtgtgatgcaattactgctgttctagcccccaaagagttttctgtgcaaaatcttgagaatcaatcaataaagaaagatggaaggaagggagaaattggaatgttttaactgcagccctcagaactttagtaacagcacaacaaattaaaaacaaaaacaactcatgccacagtatgtcgtcttcatgtgtcttgcaatgaactgtttcagtagccaatcctctttcttagtatatgaaaggacagggatttttgttcttgttgttctcgttgttgttttaagtttactggggaaagtgcatttggccaaatgaaatggtagtcaagcctattgcaacaaagttaggaagtttgttgtttgtttattataaacaaaaagcatgtgaaagtgcacttaagatagagtttttattaattacttacttattacctagattttaaatagacaatccaaagtctccccttcgtgttgccatcatcttgttgaatcagccattttatcgaggcacgtgatcagtgttgcaacataatgaaaaagatggctactgtgccttgtgttacttaatcatacagtaagctgacctggaaatgaatgaaactattactcctaagaattacattgtatagccccacagattaaatttaattaattaattcaaaacatgttaaacgttactttcatgtactatggaaaagtacaagtaggtttacattactgatttccagaagtaagtagtttcccctttcctagtcttctgtgtatgtgatgttgttaatttcttttattgcattataaaataaaaggattatgtatttttaactaaggtgagacattgatatatccttttgctacaagctatagctaatgtgctgagcttgtgccttggtgattgattgattgattgactgattgttttaactgattactgtagatcaacctgatgatttgtttgtttgaaattggcaggaaaaatgcagctttcaaatcattggggggagaaaaaggatgtctttcaggattattttaattaatttttttcataattgagacagaactgtttgttatgtaccataatgctaaataaaactgtggcacttttcaccataatttaatttagtggaaaaagaagacaatgctttccatattgtgataaggtaacatggggtttttctgggccagcctttagaacactgttagggtacatacgctaccttgatgaaagggaccttcgtgcaactgtagtcatcttaaaggcttctcatccactgtgcttcttaatgtgtaattaaagtgaggagaaattaaatactctgagggcgttttatataataaattcgtgaagaaatgtgtgctcttca

SEQ ID NO: 700 - DNA, 5066 bp, Homo sapiens
  source 1..5066: mol_type = genomic DNA
gctgcctgccgggatactcggcccgcccagccagtcctcccgtcttgcgccgcggccgcgagatccgtgtgtctcccaagatggtggcgctgggctcggggtgactacaggagacgacggggccttttcccttcgccaggacccgacacaccaggcttcgctcgctcgcgcacccctccgccgcgtagccatccgccagcgcgggcgcccgccatccgccgcctacttacgcttcacctctgccgacccggcgcgctcggctgcgggcggcggcgcctccttcggctcctcctcggaatagctcgcggcctgtagcccctggcaggagggcccctcagccccccggtgtggacaggcagcggcggctggcgacgaacgccgggatttcggcggccccggcgctccctttcccggcctcgttttccggataaggaagcgcgggtcccgcatgagccccggcggtggcggcagcgaaagagaacgaggcggtggcgggcggaggcggcgggcgagggcgactacgaccagtgaggcggccgccgcagcccaggcgcgggggcgacgacagatcaggagaacctcagtctgacgacattgaagctagccgaatgaagcgagcagctgcaaagcatctaatagaacgctactaccaccagttaactgagggctgtggaaatgaagcctgcacgaatgagttttgtgcttcctgtccaacttttcttcgtatggataataatgcagcagctattaaagccctcgagctttataagattaatgcaaaactctgtgatcctcatccctccaagaaaggagcaagctcagcttaccttgagaactcgaaaggtgcccccaacaactcctgctctgagataaaaatgaacaagaaaggcgctagaattgattttaaagatgtgacttacttaacagaagagaaggtatatgaaattcttgaattatgtagagaaagagaggattattcccctttaatccgtgttattggaagagttttttctagtgctgaggcattggtacagagcttccggaaagttaaacaacacaccaaggaagaactgaaatctcttcaagcaaaagatgaagacaaagatgaagatgaaaaggaaaaagctgcatgttctgctgctgctatggaagaagactcagaagcatcttcctcaaggataggtgatagctcacagggagacaacaatttgcaaaaattaggccctgatgatgtgtctgtggatattgatgccattagaagggtctacaccagattgctctctaatgaaaaaattgaaactgcctttctcaatgcacttgtatatttgtcacctaacgtggaatgtgacttgacgtatcacaatgtatactctcgagatcctaattatctgaatttgttcattatcgtaatggagaatagaaatctccacagtcctgaatatctggaaatggctttgccattattttgcaaagcgatgagcaagctaccccttgcagcccaaggaaaactgatcagactgtggtctaaatacaatgcagaccagattcggagaatgatggagacatttcagcaacttattacttataaagtcataagcaatgaatttaacagtcgaaatctagtgaatgatgatgatgccattgttgctgcttcgaagtgcttgaaaatggtttactatgcaaatgtagtgggaggggaagtggacacaaatcacaatgaagaagatgatgaagagcccatccctgagtccagcgagctgacacttcaggaacttttgggagaagaaagaagaaacaagaaaggtcctcgagtggaccccctggaaactgaacttggtgttaaaaccctggattgtcgaaaaccacttatcccttttgaagagtttattaatgaaccactgaatgaggttctagaaatggataaagattatacttttttcaaagtagaaacagagaacaaattctcttttatgacatgtccctttatattgaatgctgtcacaaagaatttgggattatattatgacaatagaattcgcatgtacagtgaacgaagaatcactgttctctacagcttagttcaaggacagcagttgaatccatatttgagactcaaagttagacgtgaccatatcatagatgatgcacttgtccggagatgatcgctatggaaaatcctgcagacttgaagaagcagttgtatgtggaatttgaaggagaacaaggagttgatgagggaggtgtttccaaagaattttttcagctggttgtggaggaaatcttcaatccagatattggtatgttcacatacgatgaatctacaaaattgttttggtttaatccatcttcttttgaaactgagggtcagtttactctgattggcatagtactgggtctggctatttacaataactgtatactggatgtacattttcccatggttgtctacaggaagctaatggggaaaaaaggaacttttcgtgacttgggagactctcacccagttctatatcagagtttaaaagatttattggagtatgaagggaatgtggaagatgacatgatgatcactttccagatatcacagacagatctttttggtaacccaatgatgtatgatctaaaggaaaatggtgataaaattccaattacaaatgaaaacaggaaggaatttgtcaatctttattctgactacattctcaataaatcagtagaaaaacagttcaaggcttttcggagaggttttcatatggtgaccaatgaatctcccttaaagtacttattcagaccagaagaaattgaattgcttatatgtggaagccggaatctagatttccaagcactagaagaaactacagaatatgacggtggctataccagggactctgttctgattagggagttctgggaaatcgttcattcatttacagatgaacagaaaagactcttcttgcagtttacaacgggcacagacagagcacctgtgggaggactaggaaaattaaagatgattatagccaaaaatggcccagacacagaaaggttacctacatctcatacttgctttaatgtgcttttacttccggaatactcaagcaaagaaaaacttaaagagagattgttgaaggccatcacgtatgccaaaggatttggcatgctgtaaaacaaaacaaaacaaaataaaacaaaaaaaaggaaggaaaaaaaaagaaaaaatttaaaaaattttaaaaatataacgagggataaatttttggtggtgatagtgtcccagtacaaaaaggctgtaagatagtcaaccacagtagtcacctatgtctgtgcctcccttctttattggggacatgtgggctggaacagcagatttcagctacatatatgaacaaatcctttattattattataattatttttttgcgtgaaagtgttacatattctttcacttgtatgtacagagaggtttttctgaatatttattttaagggttaaatcacttttgcttgtgtttattactgcttgaggttgagccttttgagtatttaaaaaatatataccaacagaactactctcccaaggaaaatattgccaccatttgtagaccacgtaaccttcaagtatgtgctacttttttgtccctgtatctaactcaaatcaggaactgtattttttttaatgatttgcttttgaaacttgaagtcttgaaaacagtgtgatgcaattactgctgttctagcccccaaagagttttctgtgcaaaatcttgagaatcaatcaataaagaaagatggaaggaagggagaaattggaatgttttaactgcagccctcagaactttagtaacagcacaacaaattaaaaacaaaaacaactcatgccacagtatgtcgtcttcatgtgtcttgcaatgaactgtttcagtagccaatcctctttcttagtatatgaaaggacagggatttttgttcttgttgttctcgttgttgttttaagtttactggggaaagtgcatttggccaaatgaaatggtagtcaagcctattgcaacaaagttaggaagtttgttgtttgtttattataaacaaaaagcatgtgaaagtgcacttaagatagagtttttattaattacttacttattacctagattttaaatagacaatccaaagtctccccttcgtgttgccatcatcttgttgaatcagccattttatcgaggcacgtgatcagtgttgcaacataatgaaaaagatggctactgtgccttgtgttacttaatcatacagtaagctgacctggaaatgaatgaaactattactcctaagaattacattgtatagccccacagattaaatttaattaattaattcaaaacatgttaaacgttactttcatgtactatggaaaagtacaagtaggtttacattactgatttccagaagtaagtagtttcccctttcctagtcttctgtgtatgtgatgttgttaatttcttttattgcattataaaataaaaggattatgtatttttaactaaggtgagacattgatatatccttttgctacaagctatagctaatgtgctgagcttgtgccttggtgattgattgattgattgactgattgttttaactgattactgtagatcaacctgatgatttgtttgtttgaaattggcaggaaaaatgcagctttcaaatcattggggggagaaaaaggatgtctttcaggattattttaattaatttttttcataattgagacagaactgtttgttatgtaccataatgctaaataaaactgtggcacttttcaccataatttaatttagtggaaaaagaagacaatgctttccatattgtgataaggtaacatggggtttttctgggccagcctttagaacactgttagggtacatacgctaccttgatgaaagggaccttcgtgcaactgtagtcatcttaaaggcttctcatccactgtgcttcttaatgtgtaattaaagtgaggagaaattaaatactctgagggcgttttatataataaattcgtgaagaaatgtgtgctcttca

SEQ ID NO: 701 - DNA, 6781 bp, Homo sapiens
  source 1..6781: mol_type = genomic DNA
gaagcagcgcgagcacccgaagctcccggctggcggcagaaaccgggagtggggccgggcgagtgcgcggcatcccaggccggcccgaacgctccgcccgcggtgggccgacttcccctcctcttccctctctccttcctttagcccgctggcgccggacacgctgcgcctcatctcttggggcgttcttccccgttggccaaccgtcgcatcccgtgcaactttggggtagtggccgtttagtgttgaatgttccccaccgagagcgcatggcttgggaagcgaggcgcgaacccggcccccgaagggccgccgtccgggagacggtgatgctgttgctgtgcctgggggtcccgaccggccgcccctacaacgtggacactgagagcgcgctgctttaccagggcccccacaacacgctgttcggctactcggtcgtgctgcacagccacggggcgaaccgatggctcctagtgggtgcgcccactgccaactggctcgccaacgcttcagtgatcaatcccggggcgatttacagatgcaggatcggaaagaatcccggccagacgtgcgaacagctccagctgggtagccctaatggagaaccttgtggaaagacttgtttggaagagagagacaatcagtggttgggggtcacactttccagacagccaggagaaaatggatccatcgtgacttgtgggcatagatggaaaaatatattttacataaagaatgaaaataagctccccactggtggttgctatggagtgccccctgatttacgaacagaactgagtaaaagaatagctccgtgttatcaagattatgtgaaaaaatttggagaaaattttgcatcatgtcaagctggaatatccagtttttacacaaaggatttaattgtgatgggggccccaggatcatcttactggactggctctctttttgtctacaatataactacaaataaatacaaggcttttttagacaaacaaaatcaagtaaaatttggaagttatttaggatattcagtcggagctggtcattttcggagccagcatactaccgaagtagtcggaggagctcctcaacatgagcagattggtaaggcatatatattcagcattgatgaaaaagaactaaatatcttacatgaaatgaaaggtaaaaagcttggatcgtactttggagcttctgtctgtgctgtggacctcaatgcagatggcttctcagatctgctcgtgggagcacccatgcagagcaccatcagagaggaaggaagagtgtttgtgtacatcaactctggctcgggagcagtaatgaatgcaatggaaacaaacctcgttggaagtgacaaatatgctgcaagatttggggaatctatagttaatcttggcgacattgacaatgatggctttgaagatgttgctatcggagctccacaagaagatgacttgcaaggtgctatttatatttacaatggccgtgcagatgggatctcgtcaaccttctcacagagaattgaaggacttcagatcagcaaatcgttaagtatgtttggacagtctatatcaggacaaattgatgcagataataatggctatgtagatgtagcagttggtgcttttcggtctgattctgctgtcttgctaaggacaagacctgtagtaattgttgacgcttctttaagccaccctgagtcagtaaatagaacgaaatttgactgtgttgaaaatggatggccttctgtgtgcatagatctaacactttgtttctcatataagggcaaggaagttccaggttacattgttttgttttataacatgagtttggatgtgaacagaaaggcagagtctccaccaagattctatttctcttctaatggaacttctgacgtgattacaggaagcatacaggtgtccagcagagaagctaactgtagaacacatcaagcatttatgcggaaagatgtgcgggacatcctcaccccaattcagattgaagctgcttaccaccttggtcctcatgtcatcagtaaacgaagtacagaggaattcccaccacttcagccaattcttcagcagaagaaagaaaaagacataatgaaaaaaacaataaactttgcaaggttttgtgcccatgaaaattgttctgctgatttacaggtttctgcaaagattgggtttttgaagccccatgaaaataaaacatatcttgctgttgggagtatgaagacattgatgttgaatgtgtccttgtttaatgctggagatgatgcatatgaaacgactctacatgtcaaactacccgtgggtctttatttcattaagattttagagctggaagagaagcaaataaactgtgaagtcacagataactctggcgtggtacaacttgactgcagtattggctatatatatgtagatcatctctcaaggatagatattagctttctcctggatgtgagctcactcagcagagcggaagaggacctcagtatcacagtgcatgctacctgtgaaaatgaagaggaaatggacaatctaaagcacagcagagtgactgtagcaatacctttaaaatatgaggttaagctgactgttcatgggtttgtaaacccaacttcatttgtgtatggatcaaatgatgaaaatgagcctgaaacgtgcatggtggagaaaatgaacttaactttccatgttatcaacactggcaatagtatggctcccaatgttagtgtggaaataatggtaccaaattcttttagcccccaaactgataagctgttcaacattttggatgtccagactactactggagaatgccactttgaaaattatcaaagagtgtgtgcattagagcagcaaaagagtgcaatgcagaccttgaaaggcatagtccggttcttgtccaagactgataagaggctattgtactgcataaaagctgatccacattgtttaaatttcttgtgtaattttgggaaaatggaaagtggaaaagaagccagtgttcatatccaactggaaggccggccatccattttagaaatggatgagacttcagcactcaagtttgaaataagagcaacaggttttccagagccaaatccaagagtaattgaactaaacaaggatgagaatgttgcgcatgttctactggaaggactacatcatcaaagacccaaacgttatttcaccatagtgattatttcaagtagcttgctacttggacttattgtacttctattgatctcatatgttatgtggaaggctggcttctttaaaagacaatacaaatctatcctacaagaagaaaacagaagagacagttggagttatatcaacagtaaaagcaatgatgattaaggacttctttcaaattgagagaatggaaaacagactcaggttgtagtaaagaaatttaaaagacactgtttacaagaaaaaatgaattttgtttggacttcttttactcatgatcttgtgacatattatgtcttcatgcaaggggaaaatctcagcaatgattactctttgagatagaagaactgcaaaggtaataatacagccaaagataatctctcagcttttaaatgggtagagaaacactaaagcattcaatttattcaagaaaagtaagcccttgaagatatcttgaaatgaaagtataactgagttaaattatactggagaagtcttagacttgaaatactacttaccatatgtgcttgcctcagtaaaatgaaccccactgggtgggcagaggttcatttcaaatacatctttgatacttgttcaaaatatgttctttaaaaatataattttttagagagctgttcccaaattttctaacgagtggaccattatcactttaaagccctttatttataatacatttcctacgggctgtgttccaacaaccattttttttcagcagactatgaatattatagtattataggccaaactggcaaacttcagactgaacatgtacactggtttgagcttagtgaaattacttctggataattatttttttataattatggatttcaccatctttctttctgtatatatacatgtgtttttatgtaggtatatatttaccattcttcctatctattcttcctataacacacctttatcaagcatacccaggagtaatcttcaaatcttttgttatattctgaaacaaaagattgtgagtgttgcactttacctgatacacgctgatttagaaaatacagaaaccatacctcactaataactttaaaatcaaagctgtgcaaagactagggggcctatacttcatatgtattatgtactatgtaaaatattgactatcacacaactatttccttggatgtaattctttgttaccctttacaagtataagtgttaccttacatggaaacgaagaaacaaaattcataaatttaaattcataaatttagctgaaagatactgattcaatttgtatacagtgaatataaatgagacgacagcaaaattttcatgaaatgtaaaatatttttatagtttgttcatactatatgaggttctattttaaatgactttctggattttaaaaaatttctttaaatacaatcatttttgtaatatttattttatgcttatgatctagataattgcagaatatcattttatctgactctgccttcataagagagctgtggccgaattttgaacatctgttatagggagtgatcaaattagaaggcaatgtggaaaaacaattctgggaaagatttctttatatgaagtccctgccactagccagccatcctaattgatgaaagttatctgttcacaggcctgcagtgatggtgaggaatgttctgagatttgcgaaggcatttgagtagtgaaatgtaagcacaaaacctcctgaacccagagtgtgtatacacaggaataaactttatgacatttatgtatttttaaaaaactttgtatcgttataaaaaggctagtcattctttcaggagaacatctaggatcatagatgaaaaatcaagccccgatttagaactgtcttctccaggatggtctctaaggaaatttacatttggttctttcctactcagaactactcagaaacaactatatatttcaggttatctgagcacagtgaaagcagagtactatggttgtccaacacaggcctctcagatacaaggggaacacaattacatattgggctagattttgcccagttcaaaatagtatttgttatcaacttactttgttacttgtatcatgaattttaaaaccctaccactttaagaagacagggatgggttattcttttttggcaggtaggctatataactatgtgattttgaaatttaactgctctggattagggagcagtgaatcaaggcagacttatgaaatctgtattatatttgtaacagaatataggaaatttaacataattgatgagctcaaatcctgaaaaatgaaagaatccaaattatttcagaattatctaggttaaatattgatgtattatgatggttgcaaagtttttttgtgtgtccaataaacacattgtaaaaaaaagaatttgaattgatatctaaaaacagaatttgaattgatatttcatcttgacttttaaagccctagaggctaattgttagtaacatcaatttctattaggatatccgtttggccacacagcaggaggttagagcaatggagcattactgagttcctccccctgtcagatcagcagcagcattagattctcatagaagtgcgaaccatatggtgaactggtatgtgagggatctagagtgccatgttcctcaagagaatctaatgcctgatgatctgaggtggaacagttcatcctgaaaccattcccccatccacggaaaaattgtcttccatgaaactggtcccaaaaagggtggggaccacaggtttaaagcatggccacatttctttatattaaaattctagtttgtacatttcttttagaaacaattacatgttactttggaatcatttcttccatgcttcctccataaagactgataagtcttggatgcaatctgtaaagaaaatacattatttcatcaacttattttgttgtttttcacatacacctaataagtatggtacacaatgccaatgccaaatacaaattgataacaaacacagcattcccaacagagctgtaatctagaaaactgagaaggtctgattgataaatcatcaacaacaataattgctctaaaacctccttaactgacttccttgattgtccaatgctctccattacctctgtaaaacagtcagttatgcctctagaacacccatgtctagtgggcacccctgcatgcttcttctaaccactgagtgtcacaatgcctaccaagaatgcgtttgcaggttcctaaacctgtttataccagttgctatgtaaaattgttcccaagggaagttgaatgctctgtaaaggcctaataaaagcaaattactgaacaaaacatgttacagtaattatgagtgagaggaaactaagatggaaggataaaaatctaacactttactattcagatggctccactaaaagatttaagatcttgatccatttttaaaaatccaaaatggaagttgtagacattatctgtagtttatgcacaacaataaattagaaagccaatgtagacacgcataaccaaagaaaatgccttgggtctacataacagttgaataaatgtaaagttgctttttatttattgaaa

SEQ ID NO: 702 - DNA, 1407 bp, Homo sapiens
  source 1..1407: mol_type = genomic DNA
ccgctcttgctgagcccagagccatcccgcgctctgcgggctgggaggcccgggccaggacgcgagtcctgcgcagccgaggttccccagcgccccctgcagccgcgcgtaggcagagacggagcccggccctgcgcctccgcaccacgcccgggaccccacccagcggcccgtacccggagaagcagcgcgagcacccgaagctcccggctggcggcagaaaccgggagtggggccgggcgagtgcgcggcatcccaggccggcccgaacgctccgcccgcggtgggccgacttcccctcctcttccctctctccttcctttagcccgctggcgccggacacgctgcgcctcatctcttggggcgttcttccccgttggccaaccgtcgcatcccgtgcaactttggggtagtggccgtttagtgttgaatgttccccaccgagagcgcatggcttgggaagcgaggcgcgaacccggcccccgaagggccgccgtccgggagacggtgatgctgttgctgtgcctgggggtcccgaccggccgcccctacaacgtggacactgagagcgcgctgctttaccagggcccccacaacacgctgttcggctactcggtcgtgctgcacagccacggggcgaaccgatggctcctagtgggtgcgcccactgccaactggctcgccaacgcttcagtgatcaatcccggggcgatttacagatgcaggatcggaaagaatcccggccagacgtgcgaacagctccagctgggtagccctaatggagaaccttgtggaaagacttgtttggaagagagagacaatcagtggttgggggtcacactttccagacagccaggagaaaatggatccatcgtgacttgtgggcatagatggaaaaatatattttacataaagaatgaaaataagctccccactggtggttgctatggagtgccccctgatttacgaacagaactgagtaaaagaatagctccgtgttatcaaggtagcatcagcaagtacagagctaggacataacagaagtgagcagaattggggtgaatgtcaacagagcatgtcagaggatatctgcagcaaaactaaaatccaacaatgcgtctttaggagctaagaaacatatgaatgcaaattcataattttctaaccaccctcactcaaaaaaaatccctcagcacgcaaagaaaaattttattggttggcaaaactttggccaagtatttgagttcaattatgggtgctaataagactttggtctttcttccttggaatgtgatgtcacagagcagcttatattacatatattcctattttgccttcggatacccaaaagataaaaaagtgaatattgattctcagttgcaataaaactcagtcttgatttctgta

SEQ ID NO: 703 - RNA, 16 nt, synthetic construct
  source 1..16: mol_type = other RNA
ccagcgcccaccagtc

SEQ ID NO: 704 - RNA, 21 nt, synthetic construct
  source 1..21: mol_type = other RNA
  modified_base 20..21: mod_base = OTHER; note = Thymine
tcttctagctttccttgtgtt

SEQ ID NO: 705 - DNA, 2080 bp, Homo sapiens
  source 1..2080: mol_type = genomic DNA
gcaccggttcgcggtcggcgcgagaacaagcagggtggcgcgggtccgggcatgaagctgggccgggccgtgctgggcctgctgctgctggcgccgtccgtggtgcaggcggtggagcccatcagcctgggactggccctggccggcgtcctcaccggctacatctacccgcgtctctactgcctcttcgccgagtgctgcgggcagaagcggagccttagccgggaggcactgcagaaggatctggacgacaacctctttggacagcatcttgcaaagaaaatcatcttaaatgccgtgtttggtttcataaacaacccaaagcccaagaaacctctcacgctctccctgcacgggtggacaggcaccggcaaaaatttcgtcagcaagatcatcgcagagaatatttacgagggtggtctgaacagtgactatgtccacctgtttgtggccacattgcactttccacatgcttcaaacatcaccttgtacaaggatcagttacagttgtggattcgaggcaacgtgagtgcctgtgcgaggtccatcttcatatttgatgaaatggataagatgcatgcaggcctcatagatgccatcaagcctttcctcgactattatgacctggtggatggggtctcctaccagaaagccatgttcatatttctcagcaatgctggagcagaaaggatcacagatgtggctttggatttctggaggagtggaaagcagagggaagacatcaagctcaaagacattgaacacgcgttgtctgtgtcggttttcaataacaagaacagtggcttctggcacagcagcttaattgaccggaacctcattgattattttgttcccttcctccccctggaatacaaacacctaaaaatgtgtatccgagtggaaatgcagtcccgaggctatgaaattgatgaagacattgtaagcagagtggctgaggagatgacatttttccccaaagaggagagagttttctcagataaaggctgcaaaacggtgttcaccaagttagattattactacgatgattgacagtcatgattggcagccggagtcactgcctggagttggaaaagaaacaacactcagtccttccacacttccacccccagctcctttccctggaagaggaatccagtgaatgttcctgtttgatgtgacaggaattctccctggcattgtttccaccccctggtgcctgcaggccacccagggaccacgggcgaggacgtgaagcctcccgaacacgcacagaaggaaggagccagctcccagcccactcatcgcagggctcatgattttttacaaattatgttttaattccaagtgtttctgtttcaaggaaggatgaataagttttattgaaaatgtggtaactttatttaaaatgatttttaacattatgagagactgctcagattctaagttgttggccttgtgtgtgtgtttttttttaagttctcatcattattacatagactgtgatgtatctttactggaaatgagcccaagcacacatgcatggcatttgttccacaggagggcatccctggggatgtggctggagcatgagccagctctgtcccaggatggtcccagcggatgctgccaggggcagtgaagtgtttaggtgaaggacaagtaggtaagaggacgccttcaggcaccacagataagcctgaaacagcctctccaagggttttcaccttagcaacaatgggagctgtgggagtgattttggccacactgtcaacatttgttagaaccagtcttttgaaagaaaagtatttccaacttgtcacttgccagtcactccgttttgcaaaaggtggcccttcactgtccattccaaatagcccacacgtgctctctgctggattctaaattatgtgaattttgccatattaaatcttcctcatttatactattatttgttacgttcaatcagaatccccgaaacctcctataaagcttagctgccccttctgaggatgctgagaacggtgtctttctttataaatgcaaatggctaccgttttacaataaaattttgcatgtgcca

SEQ ID NO: 706 - DNA, 2161 bp, Homo sapiens
  source 1..2161: mol_type = genomic DNA
gaagctgcctccgccatcttggagatgggagacgggcgatggctgtggtccttctgctaatgcaaacaacaaaacgggcacactagtcacccccgagggaggccaccatcactgtaactgttggccaaagctacaaaagaagcgagggaatccaaccgagcgcagcgacactgagaacagcttcccctgccttctgcggcggcagaagtgaagtgcctgaggaccggaaggatggtgcagtcctgctccgcctacggctgcaagaaccgctacgacaaggacaagcccgtttctttccacaagtttcctcttactcgacccagtctttgtaaagaatgggaggcagctgtcagaagaaaaaactttaaacccaccaagtatagcagtatttgttcagagcactttactccagactgctttaagagagagtgcaacaacaagttactgaaagagaatgctgtgcccacaatatttctttgtactgagccacatgacaagaaagaagatcttctggagccacaggaacagcttcccccacctcctttaccgcctcctgtttcccaggttgatgctgctattggattactaatgccgcctcttcagacccctgttaatctctcagttttctgtgaccacaactatactgtggaggatacaatgcaccagcggaaaaggattcatcagctagaacagcaagttgaaaaactcagaaagaagctcaagaccgcacagcagcgatgcagaaggcaagaacggcagcttgaaaaattaaaggaggttgttcacttccagaaagagaaagacgacgtatcagaaagaggttatgtgattctaccaaatgactactttgaaatagttgaagtaccagcataaaaaaatgaaatgtgtattgatttctaatggggcaataccacatatcctcctctagcctgtaaaggagtttcatttaaaaaaataacatttgattacttatataaaaacagttcagaatatttttttaaaaaaaattctatatatactgtaaaattataaatttttttgtttgtaatttcaggttttttacattttaacaaaatattttaaaagttataaactaacctcagacctctaatgtaagttggtttcaagattggggattttggggtttttttttagtatttatagaaataatgtaaaaataaaaagtaaagagaatgagaacagtgtggtaaaagggtgatttcagtttaaaacttaaaattagtactgttttattgagagaatttagttatattttaaatcagaagtatgggtcagatcatgggacataacttcttagaatatatatatacatatgtacatattctcatatgtaaagtcacaaggttcatttatctttctgaatcagttatcaaagataaattggcaagtcagtacttaagaaaaaagatttgattatcatcacagcagaaaaaagtcattgcatatctgatcaataacttcagattctaagagtggattttttttttttacatgggctcctattttttcccctactgtcttgcattataaaattagaagtgtattttcagtggaagaaacatttttcaataaataaagtaaggcattgtcatcaatgaagtaattaaaactgggacctgatctatgatacgcttttttctttcattacaccctagctgaaggacatccagttccccagctgtagttatgtatctgccttcaagtctctgacaaatgtgctgtgttagtagagtttgatttgtatcatatgataatcttgcacttgactgagttgggacaaggcttcacataaaaaattatttcttcacttttaacacaagttagaaattatatcccatttagttaagtgcgtgatttatattcagaacaacctactatgtagcgtttattttactgaatgtggagatttaaacactgaggtttctgttcaaactgtgagttctgttctttgtgagaaattttacatatattggaagtgaaaatatgttctgagtaaacaaatattgctatgggagttatctttttagatttagaataactgttccaatgataattattacttttatatttcaaagtacactaagatcgttgaagagcaatagaacctttaagacagtattaaaggtgtgaaacaatggca

SEQ ID NO: 707 - DNA, 1965 bp, Homo sapiens
  source 1..1965: mol_type = genomic DNA
gaagctgcctccgccatcttggagatgggagacgggcgatggctgtggtccttctgctaatgcaaacaacaaaacgggcacactagtcacccccgagggaggccaccatcactgtaactgttggccaaagctacaaaagaagcgagggaatccaaccgagcgcagcgacactgagaacagcttcccctgccttctgcggcggcagaagtgaagtgcctgaggaccggaaggatggtgcagtcctgctccgcctacggctgcaagaaccgctacgacaaggacaagcccgtttctttccacaaaaagaagatcttctggagccacaggaacagcttcccccacctcctttaccgcctcctgtttcccaggttgatgctgctattggattactaatgccgcctcttcagacccctgttaatctctcagttttctgtgaccacaactatactgtggaggatacaatgcaccagcggaaaaggattcatcagctagaacagcaagttgaaaaactcagaaagaagctcaagaccgcacagcagcgatgcagaaggcaagaacggcagcttgaaaaattaaaggaggttgttcacttccagaaagagaaagacgacgtatcagaaagaggttatgtgattctaccaaatgactactttgaaatagttgaagtaccagcataaaaaaatgaaatgtgtattgatttctaatggggcaataccacatatcctcctctagcctgtaaaggagtttcatttaaaaaaataacatttgattacttatataaaaacagttcagaatatttttttaaaaaaaattctatatatactgtaaaattataaatttttttgtttgtaatttcaggttttttacattttaacaaaatattttaaaagttataaactaacctcagacctctaatgtaagttggtttcaagattggggattttggggtttttttttagtatttatagaaataatgtaaaaataaaaagtaaagagaatgagaacagtgtggtaaaagggtgatttcagtttaaaacttaaaattagtactgttttattgagagaatttagttatattttaaatcagaagtatgggtcagatcatgggacataacttcttagaatatatatatacatatgtacatattctcatatgtaaagtcacaaggttcatttatctttctgaatcagttatcaaagataaattggcaagtcagtacttaagaaaaaagatttgattatcatcacagcagaaaaaagtcattgcatatctgatcaataacttcagattctaagagtggattttttttttttacatgggctcctattttttcccctactgtcttgcattataaaattagaagtgtattttcagtggaagaaacatttttcaataaataaagtaaggcattgtcatcaatgaagtaattaaaactgggacctgatctatgatacgcttttttctttcattacaccctagctgaaggacatccagttccccagctgtagttatgtatctgccttcaagtctctgacaaatgtgctgtgttagtagagtttgatttgtatcatatgataatcttgcacttgactgagttgggacaaggcttcacataaaaaattatttcttcacttttaacacaagttagaaattatatcccatttagttaagtgcgtgatttatattcagaacaacctactatgtagcgtttattttactgaatgtggagatttaaacactgaggtttctgttcaaactgtgagttctgttctttgtgagaaattttacatatattggaagtgaaaatatgttctgagtaaacaaatattgctatgggagttatctttttagatttagaataactgttccaatgataattattacttttatatttcaaagtacactaagatcgttgaagagcaatagaacctttaagacagtattaaaggtgtgaaacaatggca

SEQ ID NO: 708 - DNA, 6343 bp, Homo sapiens
  source 1..6343: mol_type = genomic DNA
agcttactaaaagcatctctctgcagccttgcctatgtcttcacttagcccattttacttttcactgcagcctctctgagatgggataggtgctgctgtggtttaaaggcaaaatatatcttcaagaaaaaagactctaaaattcatccatcctattgaagttaattgtctaggaaaggcattaacacagaaaacctcttagagtcagctctgcatgttttatttcctttggatttccaagtgaaaataattacaggaaagcctatagttatgactgattagaatactgtgattttttttcctatcccttaattttaaagaattcaatagtgtgaactttactttacatagttatatgggaattttgcaatgtcagttttaaaatttgaactggataatttttctcctgaaggcttcagacatgagcacgcttccaactcatgttttgctttaccctgtttgactgaactctctggtgattctagtcaactggaacttcagcactccagttctgtcccgactggtctgcaaaagttgtgcttttctcatcgtgagcttgagaagagtgtgtgggctgccaaaggcaaatataatgaaggtatgaatataagcaagagtgagataacaaaagaaacttcgttaaaaccgtctcggagatccctgccttgcctcgcccagagctacgcttactcaaagagcttgagccagtctacttccctcttccagtcaaccgagagtgaatctcaggctcccacatctataaccttaatctccactgacaaagcagagcaagttaatactgaggagaataaaaacgactctgtgctgagatgttcatttgctgacctcagcgatttttgtttggccctaggaaaagataaggattacacggatgaatcagaacacgctacttatgaccgatctcgtctcattaatgactttgttatcaaagataaatctgaattcaagacaaaattatctaagaatgacatgaattacatagcatccagtggacctctgttcaaagatggcaaaaagagaattgattacatcttggtttatagaaagacaaatatacaatatgataaaagaaacacatttgaaaagaacctcagagcagaaggcttgatgttggagaaggagccagctattgcaagccccgatatcatgtttattaaaattcacattccatgggacacgctgtgcaagtatgcagagaggctgaatatcaggatgcccttcaggaaaaaatgctattacactgacgggaggagcaaatcaatgggcaggatgcaaacttattttagaagaatcaaaaactggatggcccaaaacccaatggttcttgacaagtcagcttttccagacctagaggagtcagactgctatactggccccttcagccgtgcacggattcaccacttcataataaataataaagacaccttcttcagcaatgctactcgaagcagaatagtctatcacatgctggaacgcaccaaatatgaaaatggaatatcaaaagtgggtatccgtaaacttataaacaatggctcatacatagcagcgtttccaccacatgagggagcctacaaaagtagccagcccattaaaacccatggacctcagaataacagacatctattatatgagcgctgggcacgctggggaatgtggtataagcatcagcctctggatttaatcaggctatactttggtgagaagattggactatactttgcttggctgggatggtatactggaatgttgattcctgcagcaattgttggtttgtgcgttttcttctatggattatttacaatgaataatagtcaagtaagccaagaaatttgtaaagccactgaagtctttatgtgccctctctgtgacaagaactgctccctgcagagactcaacgacagctgtatctatgccaaggtgacatatttgttcgataatggagggacagtcttctttgctatttttatggcaatatgggccacagtcttcctggagttttggaaaaggagaaggagtatactgacctatacttgggaccttatcgaatgggaagaagaggaggaaacacttcgtccccagtttgaagccaagtattacaagatggagattgtaaatcccatcacgggaaaacctgaaccacatcagccttcctcagacaaagtcactcgtcttcttgtttctgtctcaggaatattcttcatgatatccttggtgatcactgcagtgtttggagttgtggtgtaccgcctggttgtcatggaacagtttgcatcattcaagtggaatttcatcaaacaatactggcagtttgcaacatctgctgctgctgtctgtatcaatttcataatcattatgttgctgaatcttgcttatgaaaaaattgcttacctcctcaccaatttagaatatcctcgaacagaatcagagtgggaaaacagcttcgccctgaagatgttcctcttccagtttgtcaatttaaacagttccatcttctatatcgctttctttttgggaagattcgtaggccacccaggaaaatacaataaactttttgaccggtggagactggaggaatgtcatcctagtggctgtttgatagacctctgcctccagatgggtgtcatcatgtttttgaagcaaatatggaacaacttcatggaactaggatacccgttgatccagaactggtggtcacgacataaaatcaagcggggaatacatgatgcttccatacctcagtgggaaaatgattggaatctgcagcccatgaaccttcatggactgatggatgagtacttagaaatggttttgcaatttggttttaccaccatctttgttgcggcttttcctctagcccctcttttggctttgttaaacaatatcattgaaatcaggctggatgcatacaaatttgtcactcaatggcggaggcctttgccagcccgagcaactgacataggtatctggcttggaattctcgaaggaatcggtatattggctgtgatcaccaatgcatttgtaattgctattacttctgattacatcccacgttttgtttatgaatacaaatatggcccctgtgcaaatcatgtagaaccaagtgaaaattgcttgaagggatatgtcaacaatagcctatccttctttgacctgagtgagcttggtatgggaaaatctggttattgcaggtacagagactacagaggcccgccctggagttccaaaccctatgagtttactttacaatactggcatatccttgctgctagattggccttcattattgtgtttgagcaccttgtttttgggattaagtcattcatcgcatacctgattccagacgtaccaaagggtctacatgaccgaatacgacgagagaagtacttagttcaagaaatgatgtatgaggctgaactggaacatttgcaacaacaacggagaaaaagtggtcagcctgttcaccatgaatggccttagttgacacctgttacccattaggggtgataacattaatgggaagaaatgatggcaactttgaatgctaggtgaaatctaggaggaaggcatacttggcaaaccacatgtataatatgctacttggaaatgtatcacagccatctctgggatttgaaatatccagacttgtagggaagaaaacaatgacttgacgaccttaaaaagggttagattgacattgcaggaagccaggatgtaattctcagaaccagtctcagggagatatatgcttggagaactctgccttccatcaactgcagtgtaatgggaaagagggtggtgaggttttgaaagacagatttccatgtaaatgtgcacaagccaggcatggcttaaaatatcatgcagtcttcactcacatactaatttgactttggaaagtatggttgagttcagatacttataagaaatgacttaaacaaatccttgccttggctgccagaactctacatcccttcagtttacaggttggtaggaattgcccatgtctcttgctgagattatggatctgtgccacaggggatttatgctgctttacattgactatgcagttgaagagttgcacatcacctttagtagtcaaaccaaaaatctaagattccaaaaagaacagcattcattgaaataatattccattgcattggctacttcaagtctcttttacccctggcagagccagttgcagtgcaattttttgtactaaatgccaataaagccacatacttataaactatgaatggctattcttatatagtttagaacacaactaatccatactttattgtggaaggctgttttatagtttatttaattttttctctatgatttattacaactctcacggaatattaacttgaaatgctgtaaatacgttggttttccttgtccctttgcaccttgacagtacgtagtatacattgtggtttatgcagctctgacaccagtttttgctattgtaatatgtttattcgggaaaactgaggccagatgctctgcaacacttacgctttttcaacaatgtgcactcttactcatgaactaatgaaaataatgcatgaatataaatctatattatttgctaaaaaaagaaaaaacatttgtgttttagtttcttttttcatgactgaagggagttttatgttattatttcttccatagttttgttttggtttatttttaacaacgctctagaaacaaagtcaaattaatcacaaaagacataattttgctttgttgtggaatttctatttcaacgtcaactctgtatctatgagtatgtctgttccacagacagatgaggcaggagtgatggggcactcaagaaagttcagaggaggcataagctatggaggttggaaaggaagaaagagaagagctgaagtaaatgtatggtagaaattaagacgtttctttgcaaaacaaggaaatcacacatatgcacacatacatatttatggttactatgattgttattatttgtccaatcaagcaaagcaccattatttctaacatataaaagaccagatcaaacacaatggaaataaagctactacatatatatgccagtatttctctagtaagattatgtttctcttactagaaaactattttctaaatattaacactgaaaatgttttgttagcttttccttctttctctccagaagaaacatggatagatgatagctgtttcattgtttgtttttgtcaagcatattcactttcctccttgtcctctgattctgagcaaagggcctcagactctgaacttccctcaagtgccgttgttatgtgaaactcttccattcagattccagagaggttctcatgctcccccccctccttatttgtagcaatcgtagcaactaattccactaagtacaagggagttttttacactcctccatttttatagcatctgcatttctttttctttgttaggtacatgtatacacctgcctgagtataaatactctctctacctaataataacatcaaccaacatcttttccaaattagggccacagaacagcaacatttgtctgacagtagtataaagaataatgatagctctatccttaagaagtatttcctttcctttttatatagtcccgttagggtttaaaaccatattgatcaactagaaagaaaaatatgaaaagagaaaaatattttaatttaaaaattgtaatacattgatttataaaatgccttctctgatacttttgaaacagatgtgaaaaacagaaaaagaaaaaattgtctgaaatgtttattttgcaaaacagtgcaatagaatctagttatgccttcatcactgttgacagtaaatactgacagccccttgcagtgtgttagttttagatcactctgttttagttgagagaaatgttttatatcatggtttttatatgaatacaaattatttctcaaagatttatagcacacactattctcaggaattctgtattacatgaatgctgcttatatattttcatattctaacttgtcttttcaagcaaataactaatatatatgtgcatgcagtctgccttgacaagttgttccaagctgaagagctttcactgtacaatgtgtggaaaatcaccatagatcatggctgaaatagtttgtaattgtctgagtctgtgcacgtacttttagataaaatgctgctgagtgactgcatgatgagatacaacttctgaatgctgcacattcttccaaaatgatccttagcacaatctattgtatgatggaatgaatagaaaactttttcactcaataaattattatttgatatggta

SEQ ID NO: 709 - DNA, 5937 bp, Homo sapiens
  source 1..5937: mol_type = genomic DNA
ggagagcgaagtgccggctacagcaggtgtcggattgcagtgcgctcgctgaggctccggaccttggagcgtctagagtctggctactgttcctccgcctccctctcgggcagctccctaagccggctgggacgcgcagagtgaaaatggtccaccattcaggctccattcagtcctttaaacagcaaaaaggtatgaatataagcaagagtgagataacaaaagaaacttcgttaaaaccgtctcggagatccctgccttgcctcgcccagagctacgcttactcaaagagcttgagccagtctacttccctcttccagtcaaccgagagtgaatctcaggctcccacatctataaccttaatctccactgacaaagcagagcaagttaatactgaggagaataaaaacgactctgtgctgagatgttcatttgctgacctcagcgatttttgtttggccctaggaaaagataaggattacacggatgaatcagaacacgctacttatgaccgatctcgtctcattaatgactttgttatcaaagataaatctgaattcaagacaaaattatctaagaatgacatgaattacatagcatccagtggacctctgttcaaagatggcaaaaagagaattgattacatcttggtttatagaaagacaaatatacaatatgataaaagaaacacatttgaaaagaacctcagagcagaaggcttgatgttggagaaggagccagctattgcaagccccgatatcatgtttattaaaattcacattccatgggacacgctgtgcaagtatgcagagaggctgaatatcaggatgcccttcaggaaaaaatgctattacactgacgggaggagcaaatcaatgggcaggatgcaaacttattttagaagaatcaaaaactggatggcccaaaacccaatggttcttgacaagtcagcttttccagacctagaggagtcagactgctatactggccccttcagccgtgcacggattcaccacttcataataaataataaagacaccttcttcagcaatgctactcgaagcagaatagtctatcacatgctggaacgcaccaaatatgaaaatggaatatcaaaagtgggtatccgtaaacttataaacaatggctcatacatagcagcgtttccaccacatgagggagcctacaaaagtagccagcccattaaaacccatggacctcagaataacagacatctattatatgagcgctgggcacgctggggaatgtggtataagcatcagcctctggatttaatcaggctatactttggtgagaagattggactatactttgcttggctgggatggtatactggaatgttgattcctgcagcaattgttggtttgtgcgttttcttctatggattatttacaatgaataatagtcaagtaagccaagaaatttgtaaagccactgaagtctttatgtgccctctctgtgacaagaactgctccctgcagagactcaacgacagctgtatctatgccaaggtgacatatttgttcgataatggagggacagtcttctttgctatttttatggcaatatgggccacagtcttcctggagttttggaaaaggagaaggagtatactgacctatacttgggaccttatcgaatgggaagaagaggaggaaacacttcgtccccagtttgaagccaagtattacaagatggagattgtaaatcccatcacgggaaaacctgaaccacatcagccttcctcagacaaagtcactcgtcttcttgtttctgtctcaggaatattcttcatgatatccttggtgatcactgcagtgtttggagttgtggtgtaccgcctggttgtcatggaacagtttgcatcattcaagtggaatttcatcaaacaatactggcagtttgcaacatctgctgctgctgtctgtatcaatttcataatcattatgttgctgaatcttgcttatgaaaaaattgcttacctcctcaccaatttagaatatcctcgaacagaatcagagtgggaaaacagcttcgccctgaagatgttcctcttccagtttgtcaatttaaacagttccatcttctatatcgctttctttttgggaagattcgtaggccacccaggaaaatacaataaactttttgaccggtggagactggaggaatgtcatcctagtggctgtttgatagacctctgcctccagatgggtgtcatcatgtttttgaagcaaatatggaacaacttcatggaactaggatacccgttgatccagaactggtggtcacgacataaaatcaagcggggaatacatgatgcttccatacctcagtgggaaaatgattggaatctgcagcccatgaaccttcatggactgatggatgagtacttagaaatggttttgcaatttggttttaccaccatctttgttgcggcttttcctctagcccctcttttggctttgttaaacaatatcattgaaatcaggctggatgcatacaaatttgtcactcaatggcggaggcctttgccagcccgagcaactgacataggtatctggcttggaattctcgaaggaatcggtatattggctgtgatcaccaatgcatttgtaattgctattacttctgattacatcccacgttttgtttatgaatacaaatatggcccctgtgcaaatcatgtagaaccaagtgaaaattgcttgaagggatatgtcaacaatagcctatccttctttgacctgagtgagcttggtatgggaaaatctggttattgcaggtacagagactacagaggcccgccctggagttccaaaccctatgagtttactttacaatactggcatatccttgctgctagattggccttcattattgtgtttgagcaccttgtttttgggattaagtcattcatcgcatacctgattccagacgtaccaaagggtctacatgaccgaatacgacgagagaagtacttagttcaagaaatgatgtatgaggctgaactggaacatttgcaacaacaacggagaaaaagtggtcagcctgttcaccatgaatggccttagttgacacctgttacccattaggggtgataacattaatgggaagaaatgatggcaactttgaatgctaggtgaaatctaggaggaaggcatacttggcaaaccacatgtataatatgctacttggaaatgtatcacagccatctctgggatttgaaatatccagacttgtagggaagaaaacaatgacttgacgaccttaaaaagggttagattgacattgcaggaagccaggatgtaattctcagaaccagtctcagggagatatatgcttggagaactctgccttccatcaactgcagtgtaatgggaaagagggtggtgaggttttgaaagacagatttccatgtaaatgtgcacaagccaggcatggcttaaaatatcatgcagtcttcactcacatactaatttgactttggaaagtatggttgagttcagatacttataagaaatgacttaaacaaatccttgccttggctgccagaactctacatcccttcagtttacaggttggtaggaattgcccatgtctcttgctgagattatggatctgtgccacaggggatttatgctgctttacattgactatgcagttgaagagttgcacatcacctttagtagtcaaaccaaaaatctaagattccaaaaagaacagcattcattgaaataatattccattgcattggctacttcaagtctcttttacccctggcagagccagttgcagtgcaattttttgtactaaatgccaataaagccacatacttataaactatgaatggctattcttatatagtttagaacacaactaatccatactttattgtggaaggctgttttatagtttatttaattttttctctatgatttattacaactctcacggaatattaacttgaaatgctgtaaatacgttggttttccttgtccctttgcaccttgacagtacgtagtatacattgtggtttatgcagctctgacaccagtttttgctattgtaatatgtttattcgggaaaactgaggccagatgctctgcaacacttacgctttttcaacaatgtgcactcttactcatgaactaatgaaaataatgcatgaatataaatctatattatttgctaaaaaaagaaaaaacatttgtgttttagtttcttttttcatgactgaagggagttttatgttattatttcttccatagttttgttttggtttatttttaacaacgctctagaaacaaagtcaaattaatcacaaaagacataattttgctttgttgtggaatttctatttcaacgtcaactctgtatctatgagtatgtctgttccacagacagatgaggcaggagtgatggggcactcaagaaagttcagaggaggcataagctatggaggttggaaaggaagaaagagaagagctgaagtaaatgtatggtagaaattaagacgtttctttgcaaaacaaggaaatcacacatatgcacacatacatatttatggttactatgattgttattatttgtccaatcaagcaaagcaccattatttctaacatataaaagaccagatcaaacacaatggaaataaagctactacatatatatgccagtatttctctagtaagattatgtttctcttactagaaaactattttctaaatattaacactgaaaatgttttgttagcttttccttctttctctccagaagaaacatggatagatgatagctgtttcattgtttgtttttgtcaagcatattcactttcctccttgtcctctgattctgagcaaagggcctcagactctgaacttccctcaagtgccgttgttatgtgaaactcttccattcagattccagagaggttctcatgctcccccccctccttatttgtagcaatcgtagcaactaattccactaagtacaagggagttttttacactcctccatttttatagcatctgcatttctttttctttgttaggtacatgtatacacctgcctgagtataaatactctctctacctaataataacatcaaccaacatcttttccaaattagggccacagaacagcaacatttgtctgacagtagtataaagaataatgatagctctatccttaagaagtatttcctttcctttttatatagtcccgttagggtttaaaaccatattgatcaactagaaagaaaaatatgaaaagagaaaaatattttaatttaaaaattgtaatacattgatttataaaatgccttctctgatacttttgaaacagatgtgaaaaacagaaaaagaaaaaattgtctgaaatgtttattttgcaaaacagtgcaatagaatctagttatgccttcatcactgttgacagtaaatactgacagccccttgcagtgtgttagttttagatcactctgttttagttgagagaaatgttttatatcatggtttttatatgaatacaaattatttctcaaagatttatagcacacactattctcaggaattctgtattacatgaatgctgcttatatattttcatattctaacttgtcttttcaagcaaataactaatatatatgtgcatgcagtctgccttgacaagttgttccaagctgaagagctttcactgtacaatgtgtggaaaatcaccatagatcatggctgaaatagtttgtaattgtctgagtctgtgcacgtacttttagataaaatgctgctgagtgactgcatgatgagatacaacttctgaatgctgcacattcttccaaaatgatccttagcacaatctattgtatgatggaatgaatagaaaactttttcactcaataaattattatttgatatggta

SEQ ID NO: 710 - DNA, 5892 bp, Homo sapiens
  source 1..5892: mol_type = genomic DNA
ggagagcgaagtgccggctacagcaggtgtcggattgcagtgcgctcgctgaggctccggaccttggagcgtctagagtctggctactgttcctccgcctccctctcgggcagctccctaagccggctgggacgcgcagagtgaaaatggtccaccattcaggctccattcagtcctttaaacagcaaaaaggtatgaatataagcaagagtgagataacaaaagaaacttcgttaaaaccgtctcggagatccctgccttgcctcgcccagagctacgcttactcaaagagcttgagccagtctacttccctcttccagtcaaccgagagtgaatctcaggctcccacatctataaccttaatctccactgacaaagcagagcaagttaatactgaggagaataaaaacgactctgtgctgagatgttcatttgctgacctcagcgatttttgtttggccctaggaaaagataaggattacacggatgaatcagaacacgctacttatgaccgatctcgtctcattaatgactttgttatcaaagataaatctgaattcaagacaaaattatctaagaatgacatgaattacatagcatccagtggacctctgttcaaagatggcaaaaagagaattgattacatcttggtttatagaaagacaaatatacaatatgataaaagaaacacatttgaaaagaacctcagagcagaaggcttgatgttggagaaggagccagctattgcaagccccgatatcatgtttattaaaattcacattccatgggacacgctgtgcaagtatgcagagaggctgaatatcaggatgcccttcaggatgcaaacttattttagaagaatcaaaaactggatggcccaaaacccaatggttcttgacaagtcagcttttccagacctagaggagtcagactgctatactggccccttcagccgtgcacggattcaccacttcataataaataataaagacaccttcttcagcaatgctactcgaagcagaatagtctatcacatgctggaacgcaccaaatatgaaaatggaatatcaaaagtgggtatccgtaaacttataaacaatggctcatacatagcagcgtttccaccacatgagggagcctacaaaagtagccagcccattaaaacccatggacctcagaataacagacatctattatatgagcgctgggcacgctggggaatgtggtataagcatcagcctctggatttaatcaggctatactttggtgagaagattggactatactttgcttggctgggatggtatactggaatgttgattcctgcagcaattgttggtttgtgcgttttcttctatggattatttacaatgaataatagtcaagtaagccaagaaatttgtaaagccactgaagtctttatgtgccctctctgtgacaagaactgctccctgcagagactcaacgacagctgtatctatgccaaggtgacatatttgttcgataatggagggacagtcttctttgctatttttatggcaatatgggccacagtcttcctggagttttggaaaaggagaaggagtatactgacctatacttgggaccttatcgaatgggaagaagaggaggaaacacttcgtccccagtttgaagccaagtattacaagatggagattgtaaatcccatcacgggaaaacctgaaccacatcagccttcctcagacaaagtcactcgtcttcttgtttctgtctcaggaatattcttcatgatatccttggtgatcactgcagtgtttggagttgtggtgtaccgcctggttgtcatggaacagtttgcatcattcaagtggaatttcatcaaacaatactggcagtttgcaacatctgctgctgctgtctgtatcaatttcataatcattatgttgctgaatcttgcttatgaaaaaattgcttacctcctcaccaatttagaatatcctcgaacagaatcagagtgggaaaacagcttcgccctgaagatgttcctcttccagtttgtcaatttaaacagttccatcttctatatcgctttctttttgggaagattcgtaggccacccaggaaaatacaataaactttttgaccggtggagactggaggaatgtcatcctagtggctgtttgatagacctctgcctccagatgggtgtcatcatgtttttgaagcaaatatggaacaacttcatggaactaggatacccgttgatccagaactggtggtcacgacataaaatcaagcggggaatacatgatgcttccatacctcagtgggaaaatgattggaatctgcagcccatgaaccttcatggactgatggatgagtacttagaaatggttttgcaatttggttttaccaccatctttgttgcggcttttcctctagcccctcttttggctttgttaaacaatatcattgaaatcaggctggatgcatacaaatttgtcactcaatggcggaggcctttgccagcccgagcaactgacataggtatctggcttggaattctcgaaggaatcggtatattggctgtgatcaccaatgcatttgtaattgctattacttctgattacatcccacgttttgtttatgaatacaaatatggcccctgtgcaaatcatgtagaaccaagtgaaaattgcttgaagggatatgtcaacaatagcctatccttctttgacctgagtgagcttggtatgggaaaatctggttattgcaggtacagagactacagaggcccgccctggagttccaaaccctatgagtttactttacaatactggcatatccttgctgctagattggccttcattattgtgtttgagcaccttgtttttgggattaagtcattcatcgcatacctgattccagacgtaccaaagggtctacatgaccgaatacgacgagagaagtacttagttcaagaaatgatgtatgaggctgaactggaacatttgcaacaacaacggagaaaaagtggtcagcctgttcaccatgaatggccttagttgacacctgttacccattaggggtgataacattaatgggaagaaatgatggcaactttgaatgctaggtgaaatctaggaggaaggcatacttggcaaaccacatgtataatatgctacttggaaatgtatcacagccatctctgggatttgaaatatccagacttgtagggaagaaaacaatgacttgacgaccttaaaaagggttagattgacattgcaggaagccaggatgtaattctcagaaccagtctcagggagatatatgcttggagaactctgccttccatcaactgcagtgtaatgggaaagagggtggtgaggttttgaaagacagatttccatgtaaatgtgcacaagccaggcatggcttaaaatatcatgcagtcttcactcacatactaatttgactttggaaagtatggttgagttcagatacttataagaaatgacttaaacaaatccttgccttggctgccagaactctacatcccttcagtttacaggttggtaggaattgcccatgtctcttgctgagattatggatctgtgccacaggggatttatgctgctttacattgactatgcagttgaagagttgcacatcacctttagtagtcaaaccaaaaatctaagattccaaaaagaacagcattcattgaaataatattccattgcattggctacttcaagtctcttttacccctggcagagccagttgcagtgcaattttttgtactaaatgccaataaagccacatacttataaactatgaatggctattcttatatagtttagaacacaactaatccatactttattgtggaaggctgttttatagtttatttaattttttctctatgatttattacaactctcacggaatattaacttgaaatgctgtaaatacgttggttttccttgtccctttgcaccttgacagtacgtagtatacattgtggtttatgcagctctgacaccagtttttgctattgtaatatgtttattcgggaaaactgaggccagatgctctgcaacacttacgctttttcaacaatgtgcactcttactcatgaactaatgaaaataatgcatgaatataaatctatattatttgctaaaaaaagaaaaaacatttgtgttttagtttcttttttcatgactgaagggagttttatgttattatttcttccatagttttgttttggtttatttttaacaacgctctagaaacaaagtcaaattaatcacaaaagacataattttgctttgttgtggaatttctatttcaacgtcaactctgtatctatgagtatgtctgttccacagacagatgaggcaggagtgatggggcactcaagaaagttcagaggaggcataagctatggaggttggaaaggaagaaagagaagagctgaagtaaatgtatggtagaaattaagacgtttctttgcaaaacaaggaaatcacacatatgcacacatacatatttatggttactatgattgttattatttgtccaatcaagcaaagcaccattatttctaacatataaaagaccagatcaaacacaatggaaataaagctactacatatatatgccagtatttctctagtaagattatgtttctcttactagaaaactattttctaaatattaacactgaaaatgttttgttagcttttccttctttctctccagaagaaacatggatagatgatagctgtttcattgtttgtttttgtcaagcatattcactttcctccttgtcctctgattctgagcaaagggcctcagactctgaacttccctcaagtgccgttgttatgtgaaactcttccattcagattccagagaggttctcatgctcccccccctccttatttgtagcaatcgtagcaactaattccactaagtacaagggagttttttacactcctccatttttatagcatctgcatttctttttctttgttaggtacatgtatacacctgcctgagtataaatactctctctacctaataataacatcaaccaacatcttttccaaattagggccacagaacagcaacatttgtctgacagtagtataaagaataatgatagctctatccttaagaagtatttcctttcctttttatatagtcccgttagggtttaaaaccatattgatcaactagaaagaaaaatatgaaaagagaaaaatattttaatttaaaaattgtaatacattgatttataaaatgccttctctgatacttttgaaacagatgtgaaaaacagaaaaagaaaaaattgtctgaaatgtttattttgcaaaacagtgcaatagaatctagttatgccttcatcactgttgacagtaaatactgacagccccttgcagtgtgttagttttagatcactctgttttagttgagagaaatgttttatatcatggtttttatatgaatacaaattatttctcaaagatttatagcacacactattctcaggaattctgtattacatgaatgctgcttatatattttcatattctaacttgtcttttcaagcaaataactaatatatatgtgcatgcagtctgccttgacaagttgttccaagctgaagagctttcactgtacaatgtgtggaaaatcaccatagatcatggctgaaatagtttgtaattgtctgagtctgtgcacgtacttttagataaaatgctgctgagtgactgcatgatgagatacaacttctgaatgctgcacattcttccaaaatgatccttagcacaatctattgtatgatggaatgaatagaaaactttttcactcaataaattattatttgatatggta

SEQ ID NO: 711 - DNA, 5564 bp, Homo sapiens
  source 1..5564: mol_type = genomic DNA
cgatctcgtctcattaatgactttgttatcaaagataaatctgaattcaagacaaaattatctaagagccatgcatgctacatgaagacttgcaggacaccataaattggatcagggcctttacccaacaagctccacatcaggtcaagatcggcaagctgaggcagaactatgacctcttctgaactatgaccatttcacaaataatgacatgaattacatagcatccagtggacctctgttcaaagatggcaaaaagagaattgattacatcttggtttatagaaagacaaatatacaatatgataaaagaaacacatttgaaaagaacctcagagcagaaggcttgatgttggagaaggagccagctattgcaagccccgatatcatgtttattaaaattcacattccatgggacacgctgtgcaagtatgcagagaggctgaatatcaggatgcccttcaggaaaaaatgctattacactgacgggaggagcaaatcaatgggcaggatgcaaacttattttagaagaatcaaaaactggatggcccaaaacccaatggttcttgacaagtcagcttttccagacctagaggagtcagactgctatactggccccttcagccgtgcacggattcaccacttcataataaataataaagacaccttcttcagcaatgctactcgaagcagaatagtctatcacatgctggaacgcaccaaatatgaaaatggaatatcaaaagtgggtatccgtaaacttataaacaatggctcatacatagcagcgtttccaccacatgagggagcctacaaaagtagccagcccattaaaacccatggacctcagaataacagacatctattatatgagcgctgggcacgctggggaatgtggtataagcatcagcctctggatttaatcaggctatactttggtgagaagattggactatactttgcttggctgggatggtatactggaatgttgattcctgcagcaattgttggtttgtgcgttttcttctatggattatttacaatgaataatagtcaagtaagccaagaaatttgtaaagccactgaagtctttatgtgccctctctgtgacaagaactgctccctgcagagactcaacgacagctgtatctatgccaaggtgacatatttgttcgataatggagggacagtcttctttgctatttttatggcaatatgggccacagtcttcctggagttttggaaaaggagaaggagtatactgacctatacttgggaccttatcgaatgggaagaagaggaggaaacacttcgtccccagtttgaagccaagtattacaagatggagattgtaaatcccatcacgggaaaacctgaaccacatcagccttcctcagacaaagtcactcgtcttcttgtttctgtctcaggaatattcttcatgatatccttggtgatcactgcagtgtttggagttgtggtgtaccgcctggttgtcatggaacagtttgcatcattcaagtggaatttcatcaaacaatactggcagtttgcaacatctgctgctgctgtctgtatcaatttcataatcattatgttgctgaatcttgcttatgaaaaaattgcttacctcctcaccaatttagaatatcctcgaacagaatcagagtgggaaaacagcttcgccctgaagatgttcctcttccagtttgtcaatttaaacagttccatcttctatatcgctttctttttgggaagattcgtaggccacccaggaaaatacaataaactttttgaccggtggagactggaggaatgtcatcctagtggctgtttgatagacctctgcctccagatgggtgtcatcatgtttttgaagcaaatatggaacaacttcatggaactaggatacccgttgatccagaactggtggtcacgacataaaatcaagcggggaatacatgatgcttccatacctcagtgggaaaatgattggaatctgcagcccatgaaccttcatggactgatggatgagtacttagaaatggttttgcaatttggttttaccaccatctttgttgcggcttttcctctagcccctcttttggctttgttaaacaatatcattgaaatcaggctggatgcatacaaatttgtcactcaatggcggaggcctttgccagcccgagcaactgacataggtatctggcttggaattctcgaaggaatcggtatattggctgtgatcaccaatgcatttgtaattgctattacttctgattacatcccacgttttgtttatgaatacaaatatggcccctgtgcaaatcatgtagaaccaagtgaaaattgcttgaagggatatgtcaacaatagcctatccttctttgacctgagtgagcttggtatgggaaaatctggttattgcaggtacagagactacagaggcccgccctggagttccaaaccctatgagtttactttacaatactggcatatccttgctgctagattggccttcattattgtgtttgagcaccttgtttttgggattaagtcattcatcgcatacctgattccagacgtaccaaagggtctacatgaccgaatacgacgagagaagtacttagttcaagaaatgatgtatgaggctgaactggaacatttgcaacaacaacggagaaaaagtggtcagcctgttcaccatgaatggccttagttgacacctgttacccattaggggtgataacattaatgggaagaaatgatggcaactttgaatgctaggtgaaatctaggaggaaggcatacttggcaaaccacatgtataatatgctacttggaaatgtatcacagccatctctgggatttgaaatatccagacttgtagggaagaaaacaatgacttgacgaccttaaaaagggttagattgacattgcaggaagccaggatgtaattctcagaaccagtctcagggagatatatgcttggagaactctgccttccatcaactgcagtgtaatgggaaagagggtggtgaggttttgaaagacagatttccatgtaaatgtgcacaagccaggcatggcttaaaatatcatgcagtcttcactcacatactaatttgactttggaaagtatggttgagttcagatacttataagaaatgacttaaacaaatccttgccttggctgccagaactctacatcccttcagtttacaggttggtaggaattgcccatgtctcttgctgagattatggatctgtgccacaggggatttatgctgctttacattgactatgcagttgaagagttgcacatcacctttagtagtcaaaccaaaaatctaagattccaaaaagaacagcattcattgaaataatattccattgcattggctacttcaagtctcttttacccctggcagagccagttgcagtgcaattttttgtactaaatgccaataaagccacatacttataaactatgaatggctattcttatatagtttagaacacaactaatccatactttattgtggaaggctgttttatagtttatttaattttttctctatgatttattacaactctcacggaatattaacttgaaatgctgtaaatacgttggttttccttgtccctttgcaccttgacagtacgtagtatacattgtggtttatgcagctctgacaccagtttttgctattgtaatatgtttattcgggaaaactgaggccagatgctctgcaacacttacgctttttcaacaatgtgcactcttactcatgaactaatgaaaataatgcatgaatataaatctatattatttgctaaaaaaagaaaaaacatttgtgttttagtttcttttttcatgactgaagggagttttatgttattatttcttccatagttttgttttggtttatttttaacaacgctctagaaacaaagtcaaattaatcacaaaagacataattttgctttgttgtggaatttctatttcaacgtcaactctgtatctatgagtatgtctgttccacagacagatgaggcaggagtgatggggcactcaagaaagttcagaggaggcataagctatggaggttggaaaggaagaaagagaagagctgaagtaaatgtatggtagaaattaagacgtttctttgcaaaacaaggaaatcacacatatgcacacatacatatttatggttactatgattgttattatttgtccaatcaagcaaagcaccattatttctaacatataaaagaccagatcaaacacaatggaaataaagctactacatatatatgccagtatttctctagtaagattatgtttctcttactagaaaactattttctaaatattaacactgaaaatgttttgttagcttttccttctttctctccagaagaaacatggatagatgatagctgtttcattgtttgtttttgtcaagcatattcactttcctccttgtcctctgattctgagcaaagggcctcagactctgaacttccctcaagtgccgttgttatgtgaaactcttccattcagattccagagaggttctcatgctcccccccctccttatttgtagcaatcgtagcaactaattccactaagtacaagggagttttttacactcctccatttttatagcatctgcatttctttttctttgttaggtacatgtatacacctgcctgagtataaatactctctctacctaataataacatcaaccaacatcttttccaaattagggccacagaacagcaacatttgtctgacagtagtataaagaataatgatagctctatccttaagaagtatttcctttcctttttatatagtcccgttagggtttaaaaccatattgatcaactagaaagaaaaatatgaaaagagaaaaatattttaatttaaaaattgtaatacattgatttataaaatgccttctctgatacttttgaaacagatgtgaaaaacagaaaaagaaaaaattgtctgaaatgtttattttgcaaaacagtgcaatagaatctagttatgccttcatcactgttgacagtaaatactgacagccccttgcagtgtgttagttttagatcactctgttttagttgagagaaatgttttatatcatggtttttatatgaatacaaattatttctcaaagatttatagcacacactattctcaggaattctgtattacatgaatgctgcttatatattttcatattctaacttgtcttttcaagcaaataactaatatatatgtgcatgcagtctgccttgacaagttgttccaagctgaagagctttcactgtacaatgtgtggaaaatcaccatagatcatggctgaaatagtttgtaattgtctgagtctgtgcacgtacttttagataaaatgctgctgagtgactgcatgatgagatacaacttctgaatgctgcacattcttccaaaatgatccttagcacaatctattgtatgatggaatgaatagaaaactttttcactcaataaattattatttgatatggta

SEQ ID NO: 712 - DNA, 5533 bp, Homo sapiens
  source 1..5533: mol_type = genomic DNA
aaatgctttgtgtagcactcagtatgtaacattctagttaatggaaaaagcaggcggtgaaagggagaactttcagttgtcacactgaagagtgctttaaagaagattgtcatttgagactgttgtcagcaatgaaggattccaaatgcagctgaactcagaattctgactgtgaatgacatgaattacatagcatccagtggacctctgttcaaagatggcaaaaagagaattgattacatcttggtttatagaaagacaaatatacaatatgataaaagaaacacatttgaaaagaacctcagagcagaaggcttgatgttggagaaggagccagctattgcaagccccgatatcatgtttattaaaattcacattccatgggacacgctgtgcaagtatgcagagaggctgaatatcaggatgcccttcaggaaaaaatgctattacactgacgggaggagcaaatcaatgggcaggatgcaaacttattttagaagaatcaaaaactggatggcccaaaacccaatggttcttgacaagtcagcttttccagacctagaggagtcagactgctatactggccccttcagccgtgcacggattcaccacttcataataaataataaagacaccttcttcagcaatgctactcgaagcagaatagtctatcacatgctggaacgcaccaaatatgaaaatggaatatcaaaagtgggtatccgtaaacttataaacaatggctcatacatagcagcgtttccaccacatgagggagcctacaaaagtagccagcccattaaaacccatggacctcagaataacagacatctattatatgagcgctgggcacgctggggaatgtggtataagcatcagcctctggatttaatcaggctatactttggtgagaagattggactatactttgcttggctgggatggtatactggaatgttgattcctgcagcaattgttggtttgtgcgttttcttctatggattatttacaatgaataatagtcaagtaagccaagaaatttgtaaagccactgaagtctttatgtgccctctctgtgacaagaactgctccctgcagagactcaacgacagctgtatctatgccaaggtgacatatttgttcgataatggagggacagtcttctttgctatttttatggcaatatgggccacagtcttcctggagttttggaaaaggagaaggagtatactgacctatacttgggaccttatcgaatgggaagaagaggaggaaacacttcgtccccagtttgaagccaagtattacaagatggagattgtaaatcccatcacgggaaaacctgaaccacatcagccttcctcagacaaagtcactcgtcttcttgtttctgtctcaggaatattcttcatgatatccttggtgatcactgcagtgtttggagttgtggtgtaccgcctggttgtcatggaacagtttgcatcattcaagtggaatttcatcaaacaatactggcagtttgcaacatctgctgctgctgtctgtatcaatttcataatcattatgttgctgaatcttgcttatgaaaaaattgcttacctcctcaccaatttagaatatcctcgaacagaatcagagtgggaaaacagcttcgccctgaagatgttcctcttccagtttgtcaatttaaacagttccatcttctatatcgctttctttttgggaagattcgtaggccacccaggaaaatacaataaactttttgaccggtggagactggaggaatgtcatcctagtggctgtttgatagacctctgcctccagatgggtgtcatcatgtttttgaagcaaatatggaacaacttcatggaactaggatacccgttgatccagaactggtggtcacgacataaaatcaagcggggaatacatgatgcttccatacctcagtgggaaaatgattggaatctgcagcccatgaaccttcatggactgatggatgagtacttagaaatggttttgcaatttggttttaccaccatctttgttgcggcttttcctctagcccctcttttggctttgttaaacaatatcattgaaatcaggctggatgcatacaaatttgtcactcaatggcggaggcctttgccagcccgagcaactgacataggtatctggcttggaattctcgaaggaatcggtatattggctgtgatcaccaatgcatttgtaattgctattacttctgattacatcccacgttttgtttatgaatacaaatatggcccctgtgcaaatcatgtagaaccaagtgaaaattgcttgaagggatatgtcaacaatagcctatccttctttgacctgagtgagcttggtatgggaaaatctggttattgcaggtacagagactacagaggcccgccctggagttccaaaccctatgagtttactttacaatactggcatatccttgctgctagattggccttcattattgtgtttgagcaccttgtttttgggattaagtcattcatcgcatacctgattccagacgtaccaaagggtctacatgaccgaatacgacgagagaagtacttagttcaagaaatgatgtatgaggctgaactggaacatttgcaacaacaacggagaaaaagtggtcagcctgttcaccatgaatggccttagttgacacctgttacccattaggggtgataacattaatgggaagaaatgatggcaactttgaatgctaggtgaaatctaggaggaaggcatacttggcaaaccacatgtataatatgctacttggaaatgtatcacagccatctctgggatttgaaatatccagacttgtagggaagaaaacaatgacttgacgaccttaaaaagggttagattgacattgcaggaagccaggatgtaattctcagaaccagtctcagggagatatatgcttggagaactctgccttccatcaactgcagtgtaatgggaaagagggtggtgaggttttgaaagacagatttccatgtaaatgtgcacaagccaggcatggcttaaaatatcatgcagtcttcactcacatactaatttgactttggaaagtatggttgagttcagatacttataagaaatgacttaaacaaatccttgccttggctgccagaactctacatcccttcagtttacaggttggtaggaattgcccatgtctcttgctgagattatggatctgtgccacaggggatttatgctgctttacattgactatgcagttgaagagttgcacatcacctttagtagtcaaaccaaaaatctaagattccaaaaagaacagcattcattgaaataatattccattgcattggctacttcaagtctcttttacccctggcagagccagttgcagtgcaattttttgtactaaatgccaataaagccacatacttataaactatgaatggctattcttatatagtttagaacacaactaatccatactttattgtggaaggctgttttatagtttatttaattttttctctatgatttattacaactctcacggaatattaacttgaaatgctgtaaatacgttggttttccttgtccctttgcaccttgacagtacgtagtatacattgtggtttatgcagctctgacaccagtttttgctattgtaatatgtttattcgggaaaactgaggccagatgctctgcaacacttacgctttttcaacaatgtgcactcttactcatgaactaatgaaaataatgcatgaatataaatctatattatttgctaaaaaaagaaaaaacatttgtgttttagtttcttttttcatgactgaagggagttttatgttattatttcttccatagttttgttttggtttatttttaacaacgctctagaaacaaagtcaaattaatcacaaaagacataattttgctttgttgtggaatttctatttcaacgtcaactctgtatctatgagtatgtctgttccacagacagatgaggcaggagtgatggggcactcaagaaagttcagaggaggcataagctatggaggttggaaaggaagaaagagaagagctgaagtaaatgtatggtagaaattaagacgtttctttgcaaaacaaggaaatcacacatatgcacacatacatatttatggttactatgattgttattatttgtccaatcaagcaaagcaccattatttctaacatataaaagaccagatcaaacacaatggaaataaagctactacatatatatgccagtatttctctagtaagattatgtttctcttactagaaaactattttctaaatattaacactgaaaatgttttgttagcttttccttctttctctccagaagaaacatggatagatgatagctgtttcattgtttgtttttgtcaagcatattcactttcctccttgtcctctgattctgagcaaagggcctcagactctgaacttccctcaagtgccgttgttatgtgaaactcttccattcagattccagagaggttctcatgctcccccccctccttatttgtagcaatcgtagcaactaattccactaagtacaagggagttttttacactcctccatttttatagcatctgcatttctttttctttgttaggtacatgtatacacctgcctgagtataaatactctctctacctaataataacatcaaccaacatcttttccaaattagggccacagaacagcaacatttgtctgacagtagtataaagaataatgatagctctatccttaagaagtatttcctttcctttttatatagtcccgttagggtttaaaaccatattgatcaactagaaagaaaaatatgaaaagagaaaaatattttaatttaaaaattgtaatacattgatttataaaatgccttctctgatacttttgaaacagatgtgaaaaacagaaaaagaaaaaattgtctgaaatgtttattttgcaaaacagtgcaatagaatctagttatgccttcatcactgttgacagtaaatactgacagccccttgcagtgtgttagttttagatcactctgttttagttgagagaaatgttttatatcatggtttttatatgaatacaaattatttctcaaagatttatagcacacactattctcaggaattctgtattacatgaatgctgcttatatattttcatattctaacttgtcttttcaagcaaataactaatatatatgtgcatgcagtctgccttgacaagttgttccaagctgaagagctttcactgtacaatgtgtggaaaatcaccatagatcatggctgaaatagtttgtaattgtctgagtctgtgcacgtacttttagataaaatgctgctgagtgactgcatgatgagatacaacttctgaatgctgcacattcttccaaaatgatccttagcacaatctattgtatgatggaatgaatagaaaactttttcactcaataaattattatttgatatggta

SEQ ID NO: 713 - DNA, 5176 bp, Homo sapiens
  source 1..5176: mol_type = genomic DNA
acacttcgagatgagatttgggtggaaacacaaagccaaaccgtatcatcactcatagttcatcatagattcacctggaaaaaatgctattacactgacgggaggagcaaatcaatgggcaggatgcaaacttattttagaagaatcaaaaactggatggcccaaaacccaatggttcttgacaagtcagcttttccagacctagaggagtcagactgctatactggccccttcagccgtgcacggattcaccacttcataataaataataaagacaccttcttcagcaatgctactcgaagcagaatagtctatcacatgctggaacgcaccaaatatgaaaatggaatatcaaaagtgggtatccgtaaacttataaacaatggctcatacatagcagcgtttccaccacatgagggagcctacaaaagtagccagcccattaaaacccatggacctcagaataacagacatctattatatgagcgctgggcacgctggggaatgtggtataagcatcagcctctggatttaatcaggctatactttggtgagaagattggactatactttgcttggctgggatggtatactggaatgttgattcctgcagcaattgttggtttgtgcgttttcttctatggattatttacaatgaataatagtcaagtaagccaagaaatttgtaaagccactgaagtctttatgtgccctctctgtgacaagaactgctccctgcagagactcaacgacagctgtatctatgccaaggtgacatatttgttcgataatggagggacagtcttctttgctatttttatggcaatatgggccacagtcttcctggagttttggaaaaggagaaggagtatactgacctatacttgggaccttatcgaatgggaagaagaggaggaaacacttcgtccccagtttgaagccaagtattacaagatggagattgtaaatcccatcacgggaaaacctgaaccacatcagccttcctcagacaaagtcactcgtcttcttgtttctgtctcaggaatattcttcatgatatccttggtgatcactgcagtgtttggagttgtggtgtaccgcctggttgtcatggaacagtttgcatcattcaagtggaatttcatcaaacaatactggcagtttgcaacatctgctgctgctgtctgtatcaatttcataatcattatgttgctgaatcttgcttatgaaaaaattgcttacctcctcaccaatttagaatatcctcgaacagaatcagagtgggaaaacagcttcgccctgaagatgttcctcttccagtttgtcaatttaaacagttccatcttctatatcgctttctttttgggaagattcgtaggccacccaggaaaatacaataaactttttgaccggtggagactggaggaatgtcatcctagtggctgtttgatagacctctgcctccagatgggtgtcatcatgtttttgaagcaaatatggaacaacttcatggaactaggatacccgttgatccagaactggtggtcacgacataaaatcaagcggggaatacatgatgcttccatacctcagtgggaaaatgattggaatctgcagcccatgaaccttcatggactgatggatgagtacttagaaatggttttgcaatttggttttaccaccatctttgttgcggcttttcctctagcccctcttttggctttgttaaacaatatcattgaaatcaggctggatgcatacaaatttgtcactcaatggcggaggcctttgccagcccgagcaactgacataggtatctggcttggaattctcgaaggaatcggtatattggctgtgatcaccaatgcatttgtaattgctattacttctgattacatcccacgttttgtttatgaatacaaatatggcccctgtgcaaatcatgtagaaccaagtgaaaattgcttgaagggatatgtcaacaatagcctatccttctttgacctgagtgagcttggtatgggaaaatctggttattgcaggtacagagactacagaggcccgccctggagttccaaaccctatgagtttactttacaatactggcatatccttgctgctagattggccttcattattgtgtttgagcaccttgtttttgggattaagtcattcatcgcatacctgattccagacgtaccaaagggtctacatgaccgaatacgacgagagaagtacttagttcaagaaatgatgtatgaggctgaactggaacatttgcaacaacaacggagaaaaagtggtcagcctgttcaccatgaatggccttagttgacacctgttacccattaggggtgataacattaatgggaagaaatgatggcaactttgaatgctaggtgaaatctaggaggaaggcatacttggcaaaccacatgtataatatgctacttggaaatgtatcacagccatctctgggatttgaaatatccagacttgtagggaagaaaacaatgacttgacgaccttaaaaagggttagattgacattgcaggaagccaggatgtaattctcagaaccagtctcagggagatatatgcttggagaactctgccttccatcaactgcagtgtaatgggaaagagggtggtgaggttttgaaagacagatttccatgtaaatgtgcacaagccaggcatggcttaaaatatcatgcagtcttcactcacatactaatttgactttggaaagtatggttgagttcagatacttataagaaatgacttaaacaaatccttgccttggctgccagaactctacatcccttcagtttacaggttggtaggaattgcccatgtctcttgctgagattatggatctgtgccacaggggatttatgctgctttacattgactatgcagttgaagagttgcacatcacctttagtagtcaaaccaaaaatctaagattccaaaaagaacagcattcattgaaataatattccattgcattggctacttcaagtctcttttacccctggcagagccagttgcagtgcaattttttgtactaaatgccaataaagccacatacttataaactatgaatggctattcttatatagtttagaacacaactaatccatactttattgtggaaggctgttttatagtttatttaattttttctctatgatttattacaactctcacggaatattaacttgaaatgctgtaaatacgttggttttccttgtccctttgcaccttgacagtacgtagtatacattgtggtttatgcagctctgacaccagtttttgctattgtaatatgtttattcgggaaaactgaggccagatgctctgcaacacttacgctttttcaacaatgtgcactcttactcatgaactaatgaaaataatgcatgaatataaatctatattatttgctaaaaaaagaaaaaacatttgtgttttagtttcttttttcatgactgaagggagttttatgttattatttcttccatagttttgttttggtttatttttaacaacgctctagaaacaaagtcaaattaatcacaaaagacataattttgctttgttgtggaatttctatttcaacgtcaactctgtatctatgagtatgtctgttccacagacagatgaggcaggagtgatggggcactcaagaaagttcagaggaggcataagctatggaggttggaaaggaagaaagagaagagctgaagtaaatgtatggtagaaattaagacgtttctttgcaaaacaaggaaatcacacatatgcacacatacatatttatggttactatgattgttattatttgtccaatcaagcaaagcaccattatttctaacatataaaagaccagatcaaacacaatggaaataaagctactacatatatatgccagtatttctctagtaagattatgtttctcttactagaaaactattttctaaatattaacactgaaaatgttttgttagcttttccttctttctctccagaagaaacatggatagatgatagctgtttcattgtttgtttttgtcaagcatattcactttcctccttgtcctctgattctgagcaaagggcctcagactctgaacttccctcaagtgccgttgttatgtgaaactcttccattcagattccagagaggttctcatgctcccccccctccttatttgtagcaatcgtagcaactaattccactaagtacaagggagttttttacactcctccatttttatagcatctgcatttctttttctttgttaggtacatgtatacacctgcctgagtataaatactctctctacctaataataacatcaaccaacatcttttccaaattagggccacagaacagcaacatttgtctgacagtagtataaagaataatgatagctctatccttaagaagtatttcctttcctttttatatagtcccgttagggtttaaaaccatattgatcaactagaaagaaaaatatgaaaagagaaaaatattttaatttaaaaattgtaatacattgatttataaaatgccttctctgatacttttgaaacagatgtgaaaaacagaaaaagaaaaaattgtctgaaatgtttattttgcaaaacagtgcaatagaatctagttatgccttcatcactgttgacagtaaatactgacagccccttgcagtgtgttagttttagatcactctgttttagttgagagaaatgttttatatcatggtttttatatgaatacaaattatttctcaaagatttatagcacacactattctcaggaattctgtattacatgaatgctgcttatatattttcatattctaacttgtcttttcaagcaaataactaatatatatgtgcatgcagtctgccttgacaagttgttccaagctgaagagctttcactgtacaatgtgtggaaaatcaccatagatcatggctgaaatagtttgtaattgtctgagtctgtgcacgtacttttagataaaatgctgctgagtgactgcatgatgagatacaacttctgaatgctgcacattcttccaaaatgatccttagcacaatctattgtatgatggaatgaatagaaaactttttcactcaataaattattatttgatatggta

SEQ ID NO: 714 - DNA, 4550 bp, Homo sapiens
  source 1..4550: mol_type = genomic DNA
atcttccgcacatcagcgtttggggatggcgccaagggccgttcagctcaatatgcctgaggttcatacttggtttctgctgcacaaggagataggttttcaactgctgagcgagaaacgaaactttagctaaaatgcaggagctagtaagcttcaaatggaatgcaaagaatctgcccagttaattggcccgaggaaagaacaagccacagtcttcctggagttttggaaaaggagaaggagtatactgacctatacttgggaccttatcgaatgggaagaagaggaggaaacacttcgtccccagtttgaagccaagtattacaagatggagattgtaaatcccatcacgggaaaacctgaaccacatcagccttcctcagacaaagtcactcgtcttcttgtttctgtctcaggaatattcttcatgatatccttggtgatcactgcagtgtttggagttgtggtgtaccgcctggttgtcatggaacagtttgcatcattcaagtggaatttcatcaaacaatactggcagtttgcaacatctgctgctgctgtctgtatcaatttcataatcattatgttgctgaatcttgcttatgaaaaaattgcttacctcctcaccaatttagaatatcctcgaacagaatcagagtgggaaaacagcttcgccctgaagatgttcctcttccagtttgtcaatttaaacagttccatcttctatatcgctttctttttgggaagattcgtaggccacccaggaaaatacaataaactttttgaccggtggagactggaggaatgtcatcctagtggctgtttgatagacctctgcctccagatgggtgtcatcatgtttttgaagcaaatatggaacaacttcatggaactaggatacccgttgatccagaactggtggtcacgacataaaatcaagcggggaatacatgatgcttccatacctcagtgggaaaatgattggaatctgcagcccatgaaccttcatggactgatggatgagtacttagaaatggttttgcaatttggttttaccaccatctttgttgcggcttttcctctagcccctcttttggctttgttaaacaatatcattgaaatcaggctggatgcatacaaatttgtcactcaatggcggaggcctttgccagcccgagcaactgacataggtatctggcttggaattctcgaaggaatcggtatattggctgtgatcaccaatgcatttgtaattgctattacttctgattacatcccacgttttgtttatgaatacaaatatggcccctgtgcaaatcatgtagaaccaagtgaaaattgcttgaagggatatgtcaacaatagcctatccttctttgacctgagtgagcttggtatgggaaaatctggttattgcaggtacagagactacagaggcccgccctggagttccaaaccctatgagtttactttacaatactggcatatccttgctgctagattggccttcattattgtgtttgagcaccttgtttttgggattaagtcattcatcgcatacctgattccagacgtaccaaagggtctacatgaccgaatacgacgagagaagtacttagttcaagaaatgatgtatgaggctgaactggaacatttgcaacaacaacggagaaaaagtggtcagcctgttcaccatgaatggccttagttgacacctgttacccattaggggtgataacattaatgggaagaaatgatggcaactttgaatgctaggtgaaatctaggaggaaggcatacttggcaaaccacatgtataatatgctacttggaaatgtatcacagccatctctgggatttgaaatatccagacttgtagggaagaaaacaatgacttgacgaccttaaaaagggttagattgacattgcaggaagccaggatgtaattctcagaaccagtctcagggagatatatgcttggagaactctgccttccatcaactgcagtgtaatgggaaagagggtggtgaggttttgaaagacagatttccatgtaaatgtgcacaagccaggcatggcttaaaatatcatgcagtcttcactcacatactaatttgactttggaaagtatggttgagttcagatacttataagaaatgacttaaacaaatccttgccttggctgccagaactctacatcccttcagtttacaggttggtaggaattgcccatgtctcttgctgagattatggatctgtgccacaggggatttatgctgctttacattgactatgcagttgaagagttgcacatcacctttagtagtcaaaccaaaaatctaagattccaaaaagaacagcattcattgaaataatattccattgcattggctacttcaagtctcttttacccctggcagagccagttgcagtgcaattttttgtactaaatgccaataaagccacatacttataaactatgaatggctattcttatatagtttagaacacaactaatccatactttattgtggaaggctgttttatagtttatttaattttttctctatgatttattacaactctcacggaatattaacttgaaatgctgtaaatacgttggttttccttgtccctttgcaccttgacagtacgtagtatacattgtggtttatgcagctctgacaccagtttttgctattgtaatatgtttattcgggaaaactgaggccagatgctctgcaacacttacgctttttcaacaatgtgcactcttactcatgaactaatgaaaataatgcatgaatataaatctatattatttgctaaaaaaagaaaaaacatttgtgttttagtttcttttttcatgactgaagggagttttatgttattatttcttccatagttttgttttggtttatttttaacaacgctctagaaacaaagtcaaattaatcacaaaagacataattttgctttgttgtggaatttctatttcaacgtcaactctgtatctatgagtatgtctgttccacagacagatgaggcaggagtgatggggcactcaagaaagttcagaggaggcataagctatggaggttggaaaggaagaaagagaagagctgaagtaaatgtatggtagaaattaagacgtttctttgcaaaacaaggaaatcacacatatgcacacatacatatttatggttactatgattgttattatttgtccaatcaagcaaagcaccattatttctaacatataaaagaccagatcaaacacaatggaaataaagctactacatatatatgccagtatttctctagtaagattatgtttctcttactagaaaactattttctaaatattaacactgaaaatgttttgttagcttttccttctttctctccagaagaaacatggatagatgatagctgtttcattgtttgtttttgtcaagcatattcactttcctccttgtcctctgattctgagcaaagggcctcagactctgaacttccctcaagtgccgttgttatgtgaaactcttccattcagattccagagaggttctcatgctcccccccctccttatttgtagcaatcgtagcaactaattccactaagtacaagggagttttttacactcctccatttttatagcatctgcatttctttttctttgttaggtacatgtatacacctgcctgagtataaatactctctctacctaataataacatcaaccaacatcttttccaaattagggccacagaacagcaacatttgtctgacagtagtataaagaataatgatagctctatccttaagaagtatttcctttcctttttatatagtcccgttagggtttaaaaccatattgatcaactagaaagaaaaatatgaaaagagaaaaatattttaatttaaaaattgtaatacattgatttataaaatgccttctctgatacttttgaaacagatgtgaaaaacagaaaaagaaaaaattgtctgaaatgtttattttgcaaaacagtgcaatagaatctagttatgccttcatcactgttgacagtaaatactgacagccccttgcagtgtgttagttttagatcactctgttttagttgagagaaatgttttatatcatggtttttatatgaatacaaattatttctcaaagatttatagcacacactattctcaggaattctgtattacatgaatgctgcttatatattttcatattctaacttgtcttttcaagcaaataactaatatatatgtgcatgcagtctgccttgacaagttgttccaagctgaagagctttcactgtacaatgtgtggaaaatcaccatagatcatggctgaaatagtttgtaattgtctgagtctgtgcacgtacttttagataaaatgctgctgagtgactgcatgatgagatacaacttctgaatgctgcacattcttccaaaatgatccttagcacaatctattgtatgatggaatgaatagaaaactttttcactcaataaattattatttgatatggta

SEQ ID NO: 715 - DNA, 6227 bp, Homo sapiens
  source 1..6227: mol_type = genomic DNA
gtcggttcggtccgctctgggcgttagcaagtgatctccagccaaggcggccgccaccccttgcacacagcagaaaatgcaaaatgaccctctggggcagtgaggggctgtggccctcggccccggcctgccgcacccccttcccgcagctggcggccggcagcgccgaacagggtccgggtgcagccccctcccgcccctccgctgaggcgccggcctgaactgggcgcgggaaccaggccgccctcggcgcccagcctgccctagtcccgcgcgccgcccccgctgtgccgcgcccacatgggtctgtgctacagtctgcggccgctgcttttcgggggcccaggggacgacccctgcgcggcctcggagccgccggtggaggacgcgcagcccgccccggccccggccctggccccagtccgggcggccgcaagggacacggcccggaccctgctccctcggggcggcgaagggagcccggcatgcgctcggcccaaagcagacaagccgaaggagaagcggcagcgcaccgagcagctgagtgccgaggagcgcgaggcggccaaggagcgcgaggcggtcaaggaggcgaggaaagtgagccggggcatcgaccgcatgctgcgcgaccagaagcgcgacctgcagcagacgcaccggctcctgctgctcggggctggtgagtctgggaaaagcactatcgtcaaacagatgaggatcctgcacgtcaatgggtttaatcccgaggaaaagaaacagaaaattctggacatccggaaaaatgttaaagatgctatcgtgacaattgtttcagcaatgagtactataatacctccagttccgctggccaaccctgaaaaccaatttcgatcagactacatcaagagcatagcccctatcactgactttgaatattcccaggaattctttgaccatgtgaaaaaactttgggacgatgaaggcgtgaaggcatgctttgagagatccaacgaataccagctgattgactgtgcacaatacttcctggaaagaatcgacagcgtcagcttggttgactacacacccacagaccaggacctcctcagatgcagagttctgacatctgggatttttgagacacgattccaagtggacaaagtaaacttccacatgtttgatgttggtggccagagggatgagaggagaaaatggatccagtgctttaacgatgtcacagctatcatttacgtcgcagcctgcagtagctacaacatggtgattcgagaagataacaacaccaacaggctgagagagtccctggatctttttgaaagcatctggaacaacaggtggttacggaccatttctatcatcttgttcttgaacaaacaagatatgctggcagaaaaagtcttggcagggaaatcaaaaattgaagactatttcccagaatatgcaaattatactgttcctgaagacgcaacaccagatgcaggagaagatcccaaagttacaagagccaagttctttatccgggacctgtttttgaggatcagcacggccaccggtgacggcaaacattactgctacccgcacttcacctgcgccgtggacacagagaacatccgcagggtgttcaacgactgccgcgacatcatccagcggatgcacctcaagcagtatgagctcttgtgaggatgctgccgccaccctgcgacggagcggcgccccggactgcctgactgccagccccatgccatggtaggaggcagagtctctagttccatctcgctgccgtctgtcccgttctgtgtcgaccaccaagcctctggctacctctgtcccctcaggtttggttgtgtagcttctgttgtcattgaatacggcctcccgcagcatcccacccccaaaccaccgactctcattgccgacactgcagcagaatctctccgggtgggagccccattattcattctccctttattgattcatcgaggagaacttggtagatggggagaaaacacagttggtttttttttccacgttatcaaccgtgactgcaagagcgttcgtgcagtgccctgagccacggccgtctctgattctccctttatgaagctgcaggctgacgagagatggtcccttcccattggccttagcccaagacttggagtcgaccccaagcgacagagtgaccagaaacccttttacagtcacattcagagtcgctgctggcctcaggcatttgaattagagctactttgagcctcttaggcagaaaacctaccacattcactactgcaaaatgtgtcctgtctaaaaatgattctctaaactttccctatacttaggcatagtcttctttcttagattctctttgttgttgtccctattgctggtttattacactgtacagaccacaaaatgtaatattcttttgtataactactaaagaaaaatccttgtagatctttgtgccttcaccatggctatctatacctgtacatgaaatgtgtttgtattgtgctgaagagcttaatgtcaacattacctgctgcttactctgaaaaaaggaatgaatggtagctgtagaatttaggatattttatcaggttggcactttataaaatactccctgatttaaaaaattgtaagttatacacgttaatcatccacattctatcgacaatgtaccaacatcacaagctgttgcaaccacctgctgttacttctctgagctgtaaaaacctgaactcaattcaggggtacaaattgcaatctaatcttttcagggaaccagggatttttttctctctctctagacaatatgtttcctcattagtctgctaatgaaacacttcttcaagttccccaagtgggaacaggtccatcattcccttagtcaaaactttggacacaggctacgtcatacaagtaagcaaacagtaagagaaaaacaaaatgtggccaggcgcggtggctcacgcctgtaatcccagcactttgggaggccgaggcaggcggatcacgaggccaggagatcaagaccatcctggctaacatggcgaaaccctgtctctaccaaaaatacaaaaattagccaggcgtggtggcgggcacctgtaatctcagctactcgagaggctgaggcaggagaatctcttgaacctgggaggtggagattgcagtgagccgaggtcgtgccatcgcactccagcctggacatcaaagtgagactcaggccaaaaaaaaaaaaaaaaaaaaccttgacgtgtcaatgtttgtgtctggcctaggagaatgaggatgacagcttcacttgccttttgaagaagaaacattacaaaaccttaatctgaagtataaagtcaaaagatacggctctttctcacacttgcaagacttacaaatacagcctcaaacattatgacacaccaacaatatctagaaagtaagaactggtgtagcaatgatgcttcatattctagctgtagccacagagttgagggtagtttttgtaggtctaaaataataatctataaagatgtccaaagttaaattttcaacaatacaaatctagagaagtgacagcctacattacttcattattactcttcttttagtctttagtctttaatattttaaagtttactctataaatcagcattttgtaatcctttataaactcatccagatttaaatgctactttttcatgaagaaaggataactttatagacagtcagtgcaacacacacattttatctcatcaccgtcttactgcctccccatccactgtctcataaagccctcagctgaactaagataaataatacaatggaaattattttcagttccccttgcactgtcaaagtaaaacaagaaaactgaaaagctgcacccccagcaagaaagggaagtatgctgttgtatgcatcattactcaacaattaccctctaactaaacatcctgtttaagagtttaattcaaacaacagccagactgttaagaaaaaaaacaaaaagaataacttttatctggcttacaattattaaagcatttattttcaggtaccaaaagccatatcccattccactttttaagtttcttttgatcactgacaggcattaacagatgtagcaacgtggtctcctatagagaaaattacacttatctaaaaatctgattccattaattgatcaagtataaaaatctacgaaaacaatatgttctgcacatcacatctgtacttttttttttttaaatatattttttgagacggagtctcactctgttgcccaggctggagtgcagtggcatgatcttggctcactgcaacctccgcctcccgggctcaagggattctcctgcctcagcctcagctggtattataggcacttgctaccatgcttggctaatttttgtatttctagcggagacgaggtttcaccatgttggccaggctggtcttgaactcctgacctcaagtgatccacccgcctcagcctcccaaagtgctgggattacaggtgtgagccactgtgcccggccacatctgtacttttaagggtacagctttacagtacataggaatttgagaaccacttcacaggaagagggaaacagcccaatatttatttatgtatacacataatcccaagtgtgtgctggggccaccaggcccttcctgggggaacaaggactgtcgtgcatgtgagtgacgacattaatagcatttacatactgtacagatgcaacctttgatgatacatatatttgataaaaatgagaaaacagatttgttgtagagtacctgtccacttttatagcatgagaacagtacaatcaactatttattttgcagttactcatttcagtgattgagaatttctgtgctgtgcagagagacggcctgtaattggtctcatcatccacttgattctaacatgatctctgcccaaagttccatttcttgggctttgatatttataatggcgcctgctcttcatcttgtcttacgctttccgagcaagttcaaaccagaaagaaaaggtgaggctagaagcccaaagtgagtgagtgtgaggaccacaaggaagcccaccactccacagtagatgatcaaaaccacatcctcacgtgggaggtagcacttggagagggtgtagtctgtgggcgtgatgctaccctggaaaggagaagggaaagttatgctgagagcaccaggcacacgttgaacaccgcagtcttagaaacagcagagggaagactgccttctcaggtccccctcaggtgaggcagggaacgggccctcctcacctgagaccaagggggcccagccttctccctgcacagctcacccccgaccagcccaggctccagcaggagagacaagtaaggcccaagtgtgcctgagtggaaaatgtctgggacactgacctgtcaaaactggcccctggctcactgggttcccatcaaatatagtgggggatccataacagagattcagagaggcaccgtggagttccagggtcatcggtcagcgaggaacaaggagggaaaggtgtcttcctgccccttgatgctcaactaagcatctgttccctagaaatacatgtgtccaggtcgtctccatgggcttttctttgcagatacttttatgtggaacaacagtggcaaatgttttcatttactttgaatttgaaaatgttagggtttcctccacctttttatgaagtaaaagaacctgtcgtaccagcatcatgagctggatgcaggagcccatggctgaaaggagttaaaacgcccagtggtcattaagtgaaacatcttttatcaacctgcaaaagctgcagcgttctctgccaggtcaaatgggcatgtttagaaaataagagaagatggctgagtatagctaatgaataaatggttgtttctttagaaaattaaacacacacagagtgtaagaggagaggatacggccctccctgaaggataaagtccacctggacggtgccctgccctcgcttctcacattaactgcccaggaatgtcatgctgattggttcccggaagggtgtttggcaaggggcagtgtatggagctacgtgtagaaggagagaaatttgtgtgtggcttttgtaaattttgaccgattgcagcaattaaatagttgattactgtgttgatttaaatacttatgaaagctttcagacaaaaataaactttcacgttaccatgatgaaa

SEQ ID NO: 716 - DNA, 5912 bp, Homo sapiens
  source 1..5912: mol_type = genomic DNA
gagccaacacggggcgcgcgcccagacgcactttcccggctcggggtgcaagagagccaggcggccgcggcgcagcggaggggctgcgggcccggaacccaggccggtcagcgtcaggaaagagaggagccgtcgcaggagccgcacacgtctccaactctctattgctttttgcgcacattcctaacttcctgacgtccatcccagcgggcaggcatggggtgtttgggcggcaacagcaagacgacggaagaccagggcgtcgatgaaaaagaacgacgcgaggccaacaaaaagatcgagaagcagttgcagaaagagcgcctggcttacaaggctacccaccgcctgctgctcctgggggctggtgagtctgggaaaagcactatcgtcaaacagatgaggatcctgcacgtcaatgggtttaatcccgaggaaaagaaacagaaaattctggacatccggaaaaatgttaaagatgctatcgtgacaattgtttcagcaatgagtactataatacctccagttccgctggccaaccctgaaaaccaatttcgatcagactacatcaagagcatagcccctatcactgactttgaatattcccaggaattctttgaccatgtgaaaaaactttgggacgatgaaggcgtgaaggcatgctttgagagatccaacgaataccagctgattgactgtgcacaatacttcctggaaagaatcgacagcgtcagcttggttgactacacacccacagaccaggacctcctcagatgcagagttctgacatctgggatttttgagacacgattccaagtggacaaagtaaacttccacatgtttgatgttggtggccagagggatgagaggagaaaatggatccagtgctttaacgatgtcacagctatcatttacgtcgcagcctgcagtagctacaacatggtgattcgagaagataacaacaccaacaggctgagagagtccctggatctttttgaaagcatctggaacaacaggtggttacggaccatttctatcatcttgttcttgaacaaacaagatatgctggcagaaaaagtcttggcagggaaatcaaaaattgaagactatttcccagaatatgcaaattatactgttcctgaagacgcaacaccagatgcaggagaagatcccaaagttacaagagccaagttctttatccgggacctgtttttgaggatcagcacggccaccggtgacggcaaacattactgctacccgcacttcacctgcgccgtggacacagagaacatccgcagggtgttcaacgactgccgcgacatcatccagcggatgcacctcaagcagtatgagctcttgtgaggatgctgccgccaccctgcgacggagcggcgccccggactgcctgactgccagccccatgccatggtaggaggcagagtctctagttccatctcgctgccgtctgtcccgttctgtgtcgaccaccaagcctctggctacctctgtcccctcaggtttggttgtgtagcttctgttgtcattgaatacggcctcccgcagcatcccacccccaaaccaccgactctcattgccgacactgcagcagaatctctccgggtgggagccccattattcattctccctttattgattcatcgaggagaacttggtagatggggagaaaacacagttggtttttttttccacgttatcaaccgtgactgcaagagcgttcgtgcagtgccctgagccacggccgtctctgattctccctttatgaagctgcaggctgacgagagatggtcccttcccattggccttagcccaagacttggagtcgaccccaagcgacagagtgaccagaaacccttttacagtcacattcagagtcgctgctggcctcaggcatttgaattagagctactttgagcctcttaggcagaaaacctaccacattcactactgcaaaatgtgtcctgtctaaaaatgattctctaaactttccctatacttaggcatagtcttctttcttagattctctttgttgttgtccctattgctggtttattacactgtacagaccacaaaatgtaatattcttttgtataactactaaagaaaaatccttgtagatctttgtgccttcaccatggctatctatacctgtacatgaaatgtgtttgtattgtgctgaagagcttaatgtcaacattacctgctgcttactctgaaaaaaggaatgaatggtagctgtagaatttaggatattttatcaggttggcactttataaaatactccctgatttaaaaaattgtaagttatacacgttaatcatccacattctatcgacaatgtaccaacatcacaagctgttgcaaccacctgctgttacttctctgagctgtaaaaacctgaactcaattcaggggtacaaattgcaatctaatcttttcagggaaccagggatttttttctctctctctagacaatatgtttcctcattagtctgctaatgaaacacttcttcaagttccccaagtgggaacaggtccatcattcccttagtcaaaactttggacacaggctacgtcatacaagtaagcaaacagtaagagaaaaacaaaatgtggccaggcgcggtggctcacgcctgtaatcccagcactttgggaggccgaggcaggcggatcacgaggccaggagatcaagaccatcctggctaacatggcgaaaccctgtctctaccaaaaatacaaaaattagccaggcgtggtggcgggcacctgtaatctcagctactcgagaggctgaggcaggagaatctcttgaacctgggaggtggagattgcagtgagccgaggtcgtgccatcgcactccagcctggacatcaaagtgagactcaggccaaaaaaaaaaaaaaaaaaaaccttgacgtgtcaatgtttgtgtctggcctaggagaatgaggatgacagcttcacttgccttttgaagaagaaacattacaaaaccttaatctgaagtataaagtcaaaagatacggctctttctcacacttgcaagacttacaaatacagcctcaaacattatgacacaccaacaatatctagaaagtaagaactggtgtagcaatgatgcttcatattctagctgtagccacagagttgagggtagtttttgtaggtctaaaataataatctataaagatgtccaaagttaaattttcaacaatacaaatctagagaagtgacagcctacattacttcattattactcttcttttagtctttagtctttaatattttaaagtttactctataaatcagcattttgtaatcctttataaactcatccagatttaaatgctactttttcatgaagaaaggataactttatagacagtcagtgcaacacacacattttatctcatcaccgtcttactgcctccccatccactgtctcataaagccctcagctgaactaagataaataatacaatggaaattattttcagttccccttgcactgtcaaagtaaaacaagaaaactgaaaagctgcacccccagcaagaaagggaagtatgctgttgtatgcatcattactcaacaattaccctctaactaaacatcctgtttaagagtttaattcaaacaacagccagactgttaagaaaaaaaacaaaaagaataacttttatctggcttacaattattaaagcatttattttcaggtaccaaaagccatatcccattccactttttaagtttcttttgatcactgacaggcattaacagatgtagcaacgtggtctcctatagagaaaattacacttatctaaaaatctgattccattaattgatcaagtataaaaatctacgaaaacaatatgttctgcacatcacatctgtacttttttttttttaaatatattttttgagacggagtctcactctgttgcccaggctggagtgcagtggcatgatcttggctcactgcaacctccgcctcccgggctcaagggattctcctgcctcagcctcagctggtattataggcacttgctaccatgcttggctaatttttgtatttctagcggagacgaggtttcaccatgttggccaggctggtcttgaactcctgacctcaagtgatccacccgcctcagcctcccaaagtgctgggattacaggtgtgagccactgtgcccggccacatctgtacttttaagggtacagctttacagtacataggaatttgagaaccacttcacaggaagagggaaacagcccaatatttatttatgtatacacataatcccaagtgtgtgctggggccaccaggcccttcctgggggaacaaggactgtcgtgcatgtgagtgacgacattaatagcatttacatactgtacagatgcaacctttgatgatacatatatttgataaaaatgagaaaacagatttgttgtagagtacctgtccacttttatagcatgagaacagtacaatcaactatttattttgcagttactcatttcagtgattgagaatttctgtgctgtgcagagagacggcctgtaattggtctcatcatccacttgattctaacatgatctctgcccaaagttccatttcttgggctttgatatttataatggcgcctgctcttcatcttgtcttacgctttccgagcaagttcaaaccagaaagaaaaggtgaggctagaagcccaaagtgagtgagtgtgaggaccacaaggaagcccaccactccacagtagatgatcaaaaccacatcctcacgtgggaggtagcacttggagagggtgtagtctgtgggcgtgatgctaccctggaaaggagaagggaaagttatgctgagagcaccaggcacacgttgaacaccgcagtcttagaaacagcagagggaagactgccttctcaggtccccctcaggtgaggcagggaacgggccctcctcacctgagaccaagggggcccagccttctccctgcacagctcacccccgaccagcccaggctccagcaggagagacaagtaaggcccaagtgtgcctgagtggaaaatgtctgggacactgacctgtcaaaactggcccctggctcactgggttcccatcaaatatagtgggggatccataacagagattcagagaggcaccgtggagttccagggtcatcggtcagcgaggaacaaggagggaaaggtgtcttcctgccccttgatgctcaactaagcatctgttccctagaaatacatgtgtccaggtcgtctccatgggcttttctttgcagatacttttatgtggaacaacagtggcaaatgttttcatttactttgaatttgaaaatgttagggtttcctccacctttttatgaagtaaaagaacctgtcgtaccagcatcatgagctggatgcaggagcccatggctgaaaggagttaaaacgcccagtggtcattaagtgaaacatcttttatcaacctgcaaaagctgcagcgttctctgccaggtcaaatgggcatgtttagaaaataagagaagatggctgagtatagctaatgaataaatggttgtttctttagaaaattaaacacacacagagtgtaagaggagaggatacggccctccctgaaggataaagtccacctggacggtgccctgccctcgcttctcacattaactgcccaggaatgtcatgctgattggttcccggaagggtgtttggcaaggggcagtgtatggagctacgtgtagaaggagagaaatttgtgtgtggcttttgtaaattttgaccgattgcagcaattaaatagttgattactgtgttgatttaaatacttatgaaagctttcagacaaaaataaactttcacgttaccatgatgaaa

SEQ ID NO: 717 - DNA, 5835 bp, Homo sapiens
  source 1..5835: mol_type = genomic DNA
agtctagaagctgagcagaacaaaggcggtgtgactgcaggaaagagaggagccgtcgcaggagccgcacacgtctccaactctctattgctttttgcgcacattcctaacttcctgacgtccatcccagcgggcaggcatggggtgtttgggcggcaacagcaagacgacggaagaccagggcgtcgatgaaaaagaacgacgcgaggccaacaaaaagatcgagaagcagttgcagaaagagcgcctggcttacaaggctacccaccgcctgctgctcctgggggctggtgagtctgggaaaagcactatcgtcaaacagatgaggatcctgcacgtcaatgggtttaatcccgaggaaaagaaacagaaaattctggacatccggaaaaatgttaaagatgctatcgtgacaattgtttcagcaatgagtactataatacctccagttccgctggccaaccctgaaaaccaatttcgatcagactacatcaagagcatagcccctatcactgactttgaatattcccaggaattctttgaccatgtgaaaaaactttgggacgatgaaggcgtgaaggcatgctttgagagatccaacgaataccagctgattgactgtgcacaatacttcctggaaagaatcgacagcgtcagcttggttgactacacacccacagaccaggacctcctcagatgcagagttctgacatctgggatttttgagacacgattccaagtggacaaagtaaacttccacatgtttgatgttggtggccagagggatgagaggagaaaatggatccagtgctttaacgatgtcacagctatcatttacgtcgcagcctgcagtagctacaacatggtgattcgagaagataacaacaccaacaggctgagagagtccctggatctttttgaaagcatctggaacaacaggtggttacggaccatttctatcatcttgttcttgaacaaacaagatatgctggcagaaaaagtcttggcagggaaatcaaaaattgaagactatttcccagaatatgcaaattatactgttcctgaagacgcaacaccagatgcaggagaagatcccaaagttacaagagccaagttctttatccgggacctgtttttgaggatcagcacggccaccggtgacggcaaacattactgctacccgcacttcacctgcgccgtggacacagagaacatccgcagggtgttcaacgactgccgcgacatcatccagcggatgcacctcaagcagtatgagctcttgtgaggatgctgccgccaccctgcgacggagcggcgccccggactgcctgactgccagccccatgccatggtaggaggcagagtctctagttccatctcgctgccgtctgtcccgttctgtgtcgaccaccaagcctctggctacctctgtcccctcaggtttggttgtgtagcttctgttgtcattgaatacggcctcccgcagcatcccacccccaaaccaccgactctcattgccgacactgcagcagaatctctccgggtgggagccccattattcattctccctttattgattcatcgaggagaacttggtagatggggagaaaacacagttggtttttttttccacgttatcaaccgtgactgcaagagcgttcgtgcagtgccctgagccacggccgtctctgattctccctttatgaagctgcaggctgacgagagatggtcccttcccattggccttagcccaagacttggagtcgaccccaagcgacagagtgaccagaaacccttttacagtcacattcagagtcgctgctggcctcaggcatttgaattagagctactttgagcctcttaggcagaaaacctaccacattcactactgcaaaatgtgtcctgtctaaaaatgattctctaaactttccctatacttaggcatagtcttctttcttagattctctttgttgttgtccctattgctggtttattacactgtacagaccacaaaatgtaatattcttttgtataactactaaagaaaaatccttgtagatctttgtgccttcaccatggctatctatacctgtacatgaaatgtgtttgtattgtgctgaagagcttaatgtcaacattacctgctgcttactctgaaaaaaggaatgaatggtagctgtagaatttaggatattttatcaggttggcactttataaaatactccctgatttaaaaaattgtaagttatacacgttaatcatccacattctatcgacaatgtaccaacatcacaagctgttgcaaccacctgctgttacttctctgagctgtaaaaacctgaactcaattcaggggtacaaattgcaatctaatcttttcagggaaccagggatttttttctctctctctagacaatatgtttcctcattagtctgctaatgaaacacttcttcaagttccccaagtgggaacaggtccatcattcccttagtcaaaactttggacacaggctacgtcatacaagtaagcaaacagtaagagaaaaacaaaatgtggccaggcgcggtggctcacgcctgtaatcccagcactttgggaggccgaggcaggcggatcacgaggccaggagatcaagaccatcctggctaacatggcgaaaccctgtctctaccaaaaatacaaaaattagccaggcgtggtggcgggcacctgtaatctcagctactcgagaggctgaggcaggagaatctcttgaacctgggaggtggagattgcagtgagccgaggtcgtgccatcgcactccagcctggacatcaaagtgagactcaggccaaaaaaaaaaaaaaaaaaaaccttgacgtgtcaatgtttgtgtctggcctaggagaatgaggatgacagcttcacttgccttttgaagaagaaacattacaaaaccttaatctgaagtataaagtcaaaagatacggctctttctcacacttgcaagacttacaaatacagcctcaaacattatgacacaccaacaatatctagaaagtaagaactggtgtagcaatgatgcttcatattctagctgtagccacagagttgagggtagtttttgtaggtctaaaataataatctataaagatgtccaaagttaaattttcaacaatacaaatctagagaagtgacagcctacattacttcattattactcttcttttagtctttagtctttaatattttaaagtttactctataaatcagcattttgtaatcctttataaactcatccagatttaaatgctactttttcatgaagaaaggataactttatagacagtcagtgcaacacacacattttatctcatcaccgtcttactgcctccccatccactgtctcataaagccctcagctgaactaagataaataatacaatggaaattattttcagttccccttgcactgtcaaagtaaaacaagaaaactgaaaagctgcacccccagcaagaaagggaagtatgctgttgtatgcatcattactcaacaattaccctctaactaaacatcctgtttaagagtttaattcaaacaacagccagactgttaagaaaaaaaacaaaaagaataacttttatctggcttacaattattaaagcatttattttcaggtaccaaaagccatatcccattccactttttaagtttcttttgatcactgacaggcattaacagatgtagcaacgtggtctcctatagagaaaattacacttatctaaaaatctgattccattaattgatcaagtataaaaatctacgaaaacaatatgttctgcacatcacatctgtacttttttttttttaaatatattttttgagacggagtctcactctgttgcccaggctggagtgcagtggcatgatcttggctcactgcaacctccgcctcccgggctcaagggattctcctgcctcagcctcagctggtattataggcacttgctaccatgcttggctaatttttgtatttctagcggagacgaggtttcaccatgttggccaggctggtcttgaactcctgacctcaagtgatccacccgcctcagcctcccaaagtgctgggattacaggtgtgagccactgtgcccggccacatctgtacttttaagggtacagctttacagtacataggaatttgagaaccacttcacaggaagagggaaacagcccaatatttatttatgtatacacataatcccaagtgtgtgctggggccaccaggcccttcctgggggaacaaggactgtcgtgcatgtgagtgacgacattaatagcatttacatactgtacagatgcaacctttgatgatacatatatttgataaaaatgagaaaacagatttgttgtagagtacctgtccacttttatagcatgagaacagtacaatcaactatttattttgcagttactcatttcagtgattgagaatttctgtgctgtgcagagagacggcctgtaattggtctcatcatccacttgattctaacatgatctctgcccaaagttccatttcttgggctttgatatttataatggcgcctgctcttcatcttgtcttacgctttccgagcaagttcaaaccagaaagaaaaggtgaggctagaagcccaaagtgagtgagtgtgaggaccacaaggaagcccaccactccacagtagatgatcaaaaccacatcctcacgtgggaggtagcacttggagagggtgtagtctgtgggcgtgatgctaccctggaaaggagaagggaaagttatgctgagagcaccaggcacacgttgaacaccgcagtcttagaaacagcagagggaagactgccttctcaggtccccctcaggtgaggcagggaacgggccctcctcacctgagaccaagggggcccagccttctccctgcacagctcacccccgaccagcccaggctccagcaggagagacaagtaaggcccaagtgtgcctgagtggaaaatgtctgggacactgacctgtcaaaactggcccctggctcactgggttcccatcaaatatagtgggggatccataacagagattcagagaggcaccgtggagttccagggtcatcggtcagcgaggaacaaggagggaaaggtgtcttcctgccccttgatgctcaactaagcatctgttccctagaaatacatgtgtccaggtcgtctccatgggcttttctttgcagatacttttatgtggaacaacagtggcaaatgttttcatttactttgaatttgaaaatgttagggtttcctccacctttttatgaagtaaaagaacctgtcgtaccagcatcatgagctggatgcaggagcccatggctgaaaggagttaaaacgcccagtggtcattaagtgaaacatcttttatcaacctgcaaaagctgcagcgttctctgccaggtcaaatgggcatgtttagaaaataagagaagatggctgagtatagctaatgaataaatggttgtttctttagaaaattaaacacacacagagtgtaagaggagaggatacggccctccctgaaggataaagtccacctggacggtgccctgccctcgcttctcacattaactgcccaggaatgtcatgctgattggttcccggaagggtgtttggcaaggggcagtgtatggagctacgtgtagaaggagagaaatttgtgtgtggcttttgtaaattttgaccgattgcagcaattaaatagttgattactgtgttgatttaaatacttatgaaagctttcagacaaaaataaactttcacgttaccatgatgaaa

SEQ ID NO: 718 - DNA, 5238 bp, Homo sapiens
  source 1..5238: mol_type = genomic DNA
gtgcattacaactgcctggtactttgtcaccaccttcctggaaagaatcgacagcgtcagcttggttgactacacacccacagaccaggacctcctcagatgcagagttctgacatctgggatttttgagacacgattccaagtggacaaagtaaacttccacatgtttgatgttggtggccagagggatgagaggagaaaatggatccagtgctttaacgatgtcacagctatcatttacgtcgcagcctgcagtagctacaacatggtgattcgagaagataacaacaccaacaggctgagagagtccctggatctttttgaaagcatctggaacaacaggtggttacggaccatttctatcatcttgttcttgaacaaacaagatatgctggcagaaaaagtcttggcagggaaatcaaaaattgaagactatttcccagaatatgcaaattatactgttcctgaagacgcaacaccagatgcaggagaagatcccaaagttacaagagccaagttctttatccgggacctgtttttgaggatcagcacggccaccggtgacggcaaacattactgctacccgcacttcacctgcgccgtggacacagagaacatccgcagggtgttcaacgactgccgcgacatcatccagcggatgcacctcaagcagtatgagctcttgtgaggatgctgccgccaccctgcgacggagcggcgccccggactgcctgactgccagccccatgccatggtaggaggcagagtctctagttccatctcgctgccgtctgtcccgttctgtgtcgaccaccaagcctctggctacctctgtcccctcaggtttggttgtgtagcttctgttgtcattgaatacggcctcccgcagcatcccacccccaaaccaccgactctcattgccgacactgcagcagaatctctccgggtgggagccccattattcattctccctttattgattcatcgaggagaacttggtagatggggagaaaacacagttggtttttttttccacgttatcaaccgtgactgcaagagcgttcgtgcagtgccctgagccacggccgtctctgattctccctttatgaagctgcaggctgacgagagatggtcccttcccattggccttagcccaagacttggagtcgaccccaagcgacagagtgaccagaaacccttttacagtcacattcagagtcgctgctggcctcaggcatttgaattagagctactttgagcctcttaggcagaaaacctaccacattcactactgcaaaatgtgtcctgtctaaaaatgattctctaaactttccctatacttaggcatagtcttctttcttagattctctttgttgttgtccctattgctggtttattacactgtacagaccacaaaatgtaatattcttttgtataactactaaagaaaaatccttgtagatctttgtgccttcaccatggctatctatacctgtacatgaaatgtgtttgtattgtgctgaagagcttaatgtcaacattacctgctgcttactctgaaaaaaggaatgaatggtagctgtagaatttaggatattttatcaggttggcactttataaaatactccctgatttaaaaaattgtaagttatacacgttaatcatccacattctatcgacaatgtaccaacatcacaagctgttgcaaccacctgctgttacttctctgagctgtaaaaacctgaactcaattcaggggtacaaattgcaatctaatcttttcagggaaccagggatttttttctctctctctagacaatatgtttcctcattagtctgctaatgaaacacttcttcaagttccccaagtgggaacaggtccatcattcccttagtcaaaactttggacacaggctacgtcatacaagtaagcaaacagtaagagaaaaacaaaatgtggccaggcgcggtggctcacgcctgtaatcccagcactttgggaggccgaggcaggcggatcacgaggccaggagatcaagaccatcctggctaacatggcgaaaccctgtctctaccaaaaatacaaaaattagccaggcgtggtggcgggcacctgtaatctcagctactcgagaggctgaggcaggagaatctcttgaacctgggaggtggagattgcagtgagccgaggtcgtgccatcgcactccagcctggacatcaaagtgagactcaggccaaaaaaaaaaaaaaaaaaaaccttgacgtgtcaatgtttgtgtctggcctaggagaatgaggatgacagcttcacttgccttttgaagaagaaacattacaaaaccttaatctgaagtataaagtcaaaagatacggctctttctcacacttgcaagacttacaaatacagcctcaaacattatgacacaccaacaatatctagaaagtaagaactggtgtagcaatgatgcttcatattctagctgtagccacagagttgagggtagtttttgtaggtctaaaataataatctataaagatgtccaaagttaaattttcaacaatacaaatctagagaagtgacagcctacattacttcattattactcttcttttagtctttagtctttaatattttaaagtttactctataaatcagcattttgtaatcctttataaactcatccagatttaaatgctactttttcatgaagaaaggataactttatagacagtcagtgcaacacacacattttatctcatcaccgtcttactgcctccccatccactgtctcataaagccctcagctgaactaagataaataatacaatggaaattattttcagttccccttgcactgtcaaagtaaaacaagaaaactgaaaagctgcacccccagcaagaaagggaagtatgctgttgtatgcatcattactcaacaattaccctctaactaaacatcctgtttaagagtttaattcaaacaacagccagactgttaagaaaaaaaacaaaaagaataacttttatctggcttacaattattaaagcatttattttcaggtaccaaaagccatatcccattccactttttaagtttcttttgatcactgacaggcattaacagatgtagcaacgtggtctcctatagagaaaattacacttatctaaaaatctgattccattaattgatcaagtataaaaatctacgaaaacaatatgttctgcacatcacatctgtacttttttttttttaaatatattttttgagacggagtctcactctgttgcccaggctggagtgcagtggcatgatcttggctcactgcaacctccgcctcccgggctcaagggattctcctgcctcagcctcagctggtattataggcacttgctaccatgcttggctaatttttgtatttctagcggagacgaggtttcaccatgttggccaggctggtcttgaactcctgacctcaagtgatccacccgcctcagcctcccaaagtgctgggattacaggtgtgagccactgtgcccggccacatctgtacttttaagggtacagctttacagtacataggaatttgagaaccacttcacaggaagagggaaacagcccaatatttatttatgtatacacataatcccaagtgtgtgctggggccaccaggcccttcctgggggaacaaggactgtcgtgcatgtgagtgacgacattaatagcatttacatactgtacagatgcaacctttgatgatacatatatttgataaaaatgagaaaacagatttgttgtagagtacctgtccacttttatagcatgagaacagtacaatcaactatttattttgcagttactcatttcagtgattgagaatttctgtgctgtgcagagagacggcctgtaattggtctcatcatccacttgattctaacatgatctctgcccaaagttccatttcttgggctttgatatttataatggcgcctgctcttcatcttgtcttacgctttccgagcaagttcaaaccagaaagaaaaggtgaggctagaagcccaaagtgagtgagtgtgaggaccacaaggaagcccaccactccacagtagatgatcaaaaccacatcctcacgtgggaggtagcacttggagagggtgtagtctgtgggcgtgatgctaccctggaaaggagaagggaaagttatgctgagagcaccaggcacacgttgaacaccgcagtcttagaaacagcagagggaagactgccttctcaggtccccctcaggtgaggcagggaacgggccctcctcacctgagaccaagggggcccagccttctccctgcacagctcacccccgaccagcccaggctccagcaggagagacaagtaaggcccaagtgtgcctgagtggaaaatgtctgggacactgacctgtcaaaactggcccctggctcactgggttcccatcaaatatagtgggggatccataacagagattcagagaggcaccgtggagttccagggtcatcggtcagcgaggaacaaggagggaaaggtgtcttcctgccccttgatgctcaactaagcatctgttccctagaaatacatgtgtccaggtcgtctccatgggcttttctttgcagatacttttatgtggaacaacagtggcaaatgttttcatttactttgaatttgaaaatgttagggtttcctccacctttttatgaagtaaaagaacctgtcgtaccagcatcatgagctggatgcaggagcccatggctgaaaggagttaaaacgcccagtggtcattaagtgaaacatcttttatcaacctgcaaaagctgcagcgttctctgccaggtcaaatgggcatgtttagaaaataagagaagatggctgagtatagctaatgaataaatggttgtttctttagaaaattaaacacacacagagtgtaagaggagaggatacggccctccctgaaggataaagtccacctggacggtgccctgccctcgcttctcacattaactgcccaggaatgtcatgctgattggttcccggaagggtgtttggcaaggggcagtgtatggagctacgtgtagaaggagagaaatttgtgtgtggcttttgtaaattttgaccgattgcagcaattaaatagttgattactgtgttgatttaaatacttatgaaagctttcagacaaaaataaactttcacgttaccatgatgaaa

SEQ ID NO: 719 - DNA, 6045 bp, Homo sapiens
  source 1..6045: mol_type = genomic DNA
gaacccggggcgctgcgccacctcggctgtctccagcggagaccggcgccctcgccccccgtctccgttcattgtgctgtattcatccagcagattttgaaacaattctcgtgtaaaaaggcattttactccgcgcgtcttccttacagccatttagttgggagtttgcggtgggcagggggagggagaagaaacgcctgctctgaatcggaaaacaccgaagagaccagaccatctctttcagcagcaggaaagagaggagccgtcgcaggagccgcacacgtctccaactctctattgctttttgcgcacattcctaacttcctgacgtccatcccagcgggcaggcatggggtgtttgggcggcaacagcaagacgacggaagaccagggcgtcgatgaaaaagaacgacgcgaggccaacaaaaagatcgagaagcagttgcagaaagagcgcctggcttacaaggctacccaccgcctgctgctcctgggggctggtgagtctgggaaaagcactatcgtcaaacagatgaggatcctgcacgtcaatgggtttaatcccgaggaaaagaaacagaaaattctggacatccggaaaaatgttaaagatgctatcgtgacaattgtttcagcaatgagtactataatacctccagttccgctggccaaccctgaaaaccaatttcgatcagactacatcaagagcatagcccctatcactgactttgaatattcccaggaattctttgaccatgtgaaaaaactttgggacgatgaaggcgtgaaggcatgctttgagagatccaacgaataccagctgattgactgtgcacaatacttcctggaaagaatcgacagcgtcagcttggttgactacacacccacagaccaggacctcctcagatgcagagttctgacatctgggatttttgagacacgattccaagtggacaaagtaaacttccacatgtttgatgttggtggccagagggatgagaggagaaaatggatccagtgctttaacgatgtcacagctatcatttacgtcgcagcctgcagtagctacaacatggtgattcgagaagataacaacaccaacaggctgagagagtccctggatctttttgaaagcatctggaacaacaggtggttacggaccatttctatcatcttgttcttgaacaaacaagatatgctggcagaaaaagtcttggcagggaaatcaaaaattgaagactatttcccagaatatgcaaattatactgttcctgaagacgcaacaccagatgcaggagaagatcccaaagttacaagagccaagttctttatccgggacctgtttttgaggatcagcacggccaccggtgacggcaaacattactgctacccgcacttcacctgcgccgtggacacagagaacatccgcagggtgttcaacgactgccgcgacatcatccagcggatgcacctcaagcagtatgagctcttgtgaggatgctgccgccaccctgcgacggagcggcgccccggactgcctgactgccagccccatgccatggtaggaggcagagtctctagttccatctcgctgccgtctgtcccgttctgtgtcgaccaccaagcctctggctacctctgtcccctcaggtttggttgtgtagcttctgttgtcattgaatacggcctcccgcagcatcccacccccaaaccaccgactctcattgccgacactgcagcagaatctctccgggtgggagccccattattcattctccctttattgattcatcgaggagaacttggtagatggggagaaaacacagttggtttttttttccacgttatcaaccgtgactgcaagagcgttcgtgcagtgccctgagccacggccgtctctgattctccctttatgaagctgcaggctgacgagagatggtcccttcccattggccttagcccaagacttggagtcgaccccaagcgacagagtgaccagaaacccttttacagtcacattcagagtcgctgctggcctcaggcatttgaattagagctactttgagcctcttaggcagaaaacctaccacattcactactgcaaaatgtgtcctgtctaaaaatgattctctaaactttccctatacttaggcatagtcttctttcttagattctctttgttgttgtccctattgctggtttattacactgtacagaccacaaaatgtaatattcttttgtataactactaaagaaaaatccttgtagatctttgtgccttcaccatggctatctatacctgtacatgaaatgtgtttgtattgtgctgaagagcttaatgtcaacattacctgctgcttactctgaaaaaaggaatgaatggtagctgtagaatttaggatattttatcaggttggcactttataaaatactccctgatttaaaaaattgtaagttatacacgttaatcatccacattctatcgacaatgtaccaacatcacaagctgttgcaaccacctgctgttacttctctgagctgtaaaaacctgaactcaattcaggggtacaaattgcaatctaatcttttcagggaaccagggatttttttctctctctctagacaatatgtttcctcattagtctgctaatgaaacacttcttcaagttccccaagtgggaacaggtccatcattcccttagtcaaaactttggacacaggctacgtcatacaagtaagcaaacagtaagagaaaaacaaaatgtggccaggcgcggtggctcacgcctgtaatcccagcactttgggaggccgaggcaggcggatcacgaggccaggagatcaagaccatcctggctaacatggcgaaaccctgtctctaccaaaaatacaaaaattagccaggcgtggtggcgggcacctgtaatctcagctactcgagaggctgaggcaggagaatctcttgaacctgggaggtggagattgcagtgagccgaggtcgtgccatcgcactccagcctggacatcaaagtgagactcaggccaaaaaaaaaaaaaaaaaaaaccttgacgtgtcaatgtttgtgtctggcctaggagaatgaggatgacagcttcacttgccttttgaagaagaaacattacaaaaccttaatctgaagtataaagtcaaaagatacggctctttctcacacttgcaagacttacaaatacagcctcaaacattatgacacaccaacaatatctagaaagtaagaactggtgtagcaatgatgcttcatattctagctgtagccacagagttgagggtagtttttgtaggtctaaaataataatctataaagatgtccaaagttaaattttcaacaatacaaatctagagaagtgacagcctacattacttcattattactcttcttttagtctttagtctttaatattttaaagtttactctataaatcagcattttgtaatcctttataaactcatccagatttaaatgctactttttcatgaagaaaggataactttatagacagtcagtgcaacacacacattttatctcatcaccgtcttactgcctccccatccactgtctcataaagccctcagctgaactaagataaataatacaatggaaattattttcagttccccttgcactgtcaaagtaaaacaagaaaactgaaaagctgcacccccagcaagaaagggaagtatgctgttgtatgcatcattactcaacaattaccctctaactaaacatcctgtttaagagtttaattcaaacaacagccagactgttaagaaaaaaaacaaaaagaataacttttatctggcttacaattattaaagcatttattttcaggtaccaaaagccatatcccattccactttttaagtttcttttgatcactgacaggcattaacagatgtagcaacgtggtctcctatagagaaaattacacttatctaaaaatctgattccattaattgatcaagtataaaaatctacgaaaacaatatgttctgcacatcacatctgtacttttttttttttaaatatattttttgagacggagtctcactctgttgcccaggctggagtgcagtggcatgatcttggctcactgcaacctccgcctcccgggctcaagggattctcctgcctcagcctcagctggtattataggcacttgctaccatgcttggctaatttttgtatttctagcggagacgaggtttcaccatgttggccaggctggtcttgaactcctgacctcaagtgatccacccgcctcagcctcccaaagtgctgggattacaggtgtgagccactgtgcccggccacatctgtacttttaagggtacagctttacagtacataggaatttgagaaccacttcacaggaagagggaaacagcccaatatttatttatgtatacacataatcccaagtgtgtgctggggccaccaggcccttcctgggggaacaaggactgtcgtgcatgtgagtgacgacattaatagcatttacatactgtacagatgcaacctttgatgatacatatatttgataaaaatgagaaaacagatttgttgtagagtacctgtccacttttatagcatgagaacagtacaatcaactatttattttgcagttactcatttcagtgattgagaatttctgtgctgtgcagagagacggcctgtaattggtctcatcatccacttgattctaacatgatctctgcccaaagttccatttcttgggctttgatatttataatggcgcctgctcttcatcttgtcttacgctttccgagcaagttcaaaccagaaagaaaaggtgaggctagaagcccaaagtgagtgagtgtgaggaccacaaggaagcccaccactccacagtagatgatcaaaaccacatcctcacgtgggaggtagcacttggagagggtgtagtctgtgggcgtgatgctaccctggaaaggagaagggaaagttatgctgagagcaccaggcacacgttgaacaccgcagtcttagaaacagcagagggaagactgccttctcaggtccccctcaggtgaggcagggaacgggccctcctcacctgagaccaagggggcccagccttctccctgcacagctcacccccgaccagcccaggctccagcaggagagacaagtaaggcccaagtgtgcctgagtggaaaatgtctgggacactgacctgtcaaaactggcccctggctcactgggttcccatcaaatatagtgggggatccataacagagattcagagaggcaccgtggagttccagggtcatcggtcagcgaggaacaaggagggaaaggtgtcttcctgccccttgatgctcaactaagcatctgttccctagaaatacatgtgtccaggtcgtctccatgggcttttctttgcagatacttttatgtggaacaacagtggcaaatgttttcatttactttgaatttgaaaatgttagggtttcctccacctttttatgaagtaaaagaacctgtcgtaccagcatcatgagctggatgcaggagcccatggctgaaaggagttaaaacgcccagtggtcattaagtgaaacatcttttatcaacctgcaaaagctgcagcgttctctgccaggtcaaatgggcatgtttagaaaataagagaagatggctgagtatagctaatgaataaatggttgtttctttagaaaattaaacacacacagagtgtaagaggagaggatacggccctccctgaaggataaagtccacctggacggtgccctgccctcgcttctcacattaactgcccaggaatgtcatgctgattggttcccggaagggtgtttggcaaggggcagtgtatggagctacgtgtagaaggagagaaatttgtgtgtggcttttgtaaattttgaccgattgcagcaattaaatagttgattactgtgttgatttaaatacttatgaaagctttcagacaaaaataaactttcacgttaccatgatgaaa

SEQ ID NO: 720 - DNA, 1659 bp, Homo sapiens
  source 1..1659: mol_type = genomic DNA
gtcggttcggtccgctctgggcgttagcaagtgatctccagccaaggcggccgccaccccttgcacacagcagaaaatgcaaaatgaccctctggggcagtgaggggctgtggccctcggccccggcctgccgcacccccttcccgcagctggcggccggcagcgccgaacagggtccgggtgcagccccctcccgcccctccgctgaggcgccggcctgaactgggcgcgggaaccaggccgccctcggcgcccagcctgccctagtcccgcgcgccgcccccgctgtgccgcgcccacatgggtctgtgctacagtctgcggccgctgcttttcgggggcccaggggacgacccctgcgcggcctcggagccgccggtggaggacgcgcagcccgccccggccccggccctggccccagtccgggcggccgcaagggacacggcccggaccctgctccctcggggcggcgaagggagcccggcatgcgctcggcccaaagcagacaagccgaaggagaagcggcagcgcaccgagcagctgagtgccgaggagcgcgaggcggccaaggagcgcgaggcggtcaaggaggcgaggaaagtgagccggggcatcgaccgcatgctgcgcgaccagaagcgcgacctgcagcagacgcaccggctcctgctgctcggggctggtgagtctgggaaaagcactatcgtcaaacagatgaggatcctgcacgtcaatgggtttaatcccgaggaaaagaaacagaaaattctggacatccggaaaaatgttaaagatgctatcgtgacaattgtttcagcaatgagtactataatacctccagttccgctggccaaccctgaaaaccaatttcgatcagactacatcaagagcatagcccctatcactgactttgaatattcccaggaattctttgaccatgtgaaaaaactttgggacgatgaaggcgtgaaggcatgctttgagagatccaacgaataccagctgattgactgtgcacaataaaacccttgccctgagacatccagaagaaaatttttagtgggattaccacaaatgtttttgtgtgtaaaacctgtttttaaaatatctcagaaaatctacttacttgggtggagaactgcagtggcttcccattccttatctaacgtaaccctcagacttcctatacagaaaggatgcctggaacaggatggccttcagggcctggcctctctgcccagcacatacatcacaggaatctccaatcatggcgtgaaaatcaggaccttcaaactataaaacaaaaatcacatttttgatgccttagagctggatttttcagtatttcttagaaatggaacgcttcgtcacacggaactgtatggaatgccactagcaaagagggagaagacaagtcccctggtgaggagccggagcccttgtattcgcttctgcctgctgctgtgtggcccctctgttgcctccaaatgtgaggctccccggggtgcggtttaaaaactagtgcccgttttcaaaattcataccagcagaaccaaatgcaatttatagccaatgccaaagcaaagtggtattttattaaaataaatatatgaaaccaaagtgaaaatttaataaagtaaaatttagtttacatattca

SEQ ID NO: 721 - DNA, 8485 bp, Homo sapiens
  source 1..8485: mol_type = genomic DNA
ctctcacggtgccaagatggcggcggcggcgggcggcggcagttgccccgggcctggctccgcgcggggccgcttcccgggccggccgcggggcgccggcgggggcgggggccgcggcggacggggcaacggggccgaaagagtgcgggtagctctgcggcgcggcggtggcgcgacggggccgggcggagccgagcccggggaggacacggccctgctccgtttgctggggctccgccggggcctgcgccggctccgccgcctgtgggccggcccgcgggtccagcggggccggggacggggtcggggccggggctggggcccgagtcgaggctgcgtgccggaggaggagagcagtgacggggaatccgacgaggaggagtttcagggttttcattcagatgaagatgtggcccccagttccctgcgctctgcgctccgatcccagcgaggtcgagcgccccgaggtcggggtcgcaagcataagacgaccccccttcctcctcctcgcctagcagatgtggctcctacccccccaaagacccctgcccggaaacggggtgaggaaggcacagaacggatggtgcaggcactgactgaacttctccggcgggcccaggcaccccaagcaccccggagccgggcatgtgagccctccaccccccggcggtctcggggacggcccccaggacggccagcaggcccctgcaggaggaagcagcaagcagtagtggtggcagaagcagctgtgacaatccccaaacctgagcccccacctcctgtggttccagtgaaacatcagactggcagctggaaatgcaaggaggggcccggtccaggacctgggacccccaggcgtggaggacagtcaagccgtggaggccgtggaggcaggggccgcggccgaggtggtgggctcccctttgtgatcaagtttgtttcaagggccaaaaaagtaaagatgggacaattgtccttgggactcgaatcaggtcaaggtcaaggtcaacatgaggaaagttggcaggatgtcccccaaagaagagttggatctggacagggagggagcccttgctggaaaaagcaggaacagaagctggatgacgaggaagaagagaagaaagaagaagaagaaaaagacaaggagggagaagagaaggaagaaagagctgtagctgaggagatgatgccagctgcggaaaaggaagaggcaaagctgccaccaccgcctctgactcctccagccccttcacctcctccacccctcccacccccttcgacatctcctccacccccactctgccctccaccaccacccccagtgtccccaccacctctaccatcccctccaccgcctcctgcccaagaggagcaggaggaatcccctcctcctgtggtcccagctacgtgctccaggaagaggggccggcctcccctgactcccagccagcgggcggagcgggaagctgctcgggcagggccagagggcacctctcctcccactccaacccccagcaccgccacgggaggccctccggaagacagtcccaccgtggcccccaaaagcaccaccttcctgaagaatatccggcagtttattatgcctgtggtgagtgcccgctcctcccgtgtcatcaagacaccccggcgatttatggatgaagacccccccaaacccccaaaggtggaggtctcacctgtcctgcgacctcccattaccacctccccacctgttccccaggagccagcaccagtcccctctccaccacgtgccccaactcctccatctaccccagttccactccctgagaagagacggtccatcctaagggaacccacatttcgctggacctcactgacccgggagctgccccctcctcccccagcccctccacctcccccggccccctccccaccccctgctcctgccacctcctcccggaggcccctactccttcgggcccctcagtttaccccaagcgaagcccacctgaagatctacgaatcggtgcttactcctcctcctcttggggctcctgaagcccctgagccagagcctcctcctgccgatgactctccagctgagcctgagcctcgggcagtgggccgcaccaaccacctcagcctgcctcgattcgcccctgtggtcaccactcctgttaaggccgaggtgtcccctcacggggctccagctctgagcaacgggccacagacacaggctcagctactgcagcccctgcaggccttgcaaacccagctcctgccccaggcactaccgccaccacagccacagctgcagccaccgccgtcaccacagcagatgcctcccctggaaaaagcccggattgcgggcgtgggttccttgccgctgtctggggtagaggagaagatgttcagcctcctcaagagagccaaagtgcagctattcaagatcgatcagcagcagcagcagaaggtggcagcttccatgccgctgagccctggagggcagatggaggaggtggccggggctgtcaagcagatctccgacagaggccctgtccggtctgaagatgagtcggtggaagctaagagagagcggccctcaggtcccgagtcccctgtgcaaggtccccgcatcaaacatgtctgccgtcatgctgctgtggccctgggtcaggcccgggccatggtgcctgaagatgtccctcgcctcagtgccctccctctccgggatcggcaggacctcgccacagaggatacatcatcggcgtccgagactgagagtgtcccgtcacggtcccggcggggaaaggtggaggcagcaggccctgggggagaatcagagcccacaggttctggagggaccctggcccacacaccccggcgctcactgccctcccatcacggcaagaagatgcgcatggctcgatgtggacactgtcggggctgcctacgtgtgcaggactgtgggtcctgtgtcaactgcctagacaagcccaagtttgggggccctaacaccaagaagcagtgctgtgtataccggaagtgtgacaaaatagaggctcggaagatggaacgactggctaaaaaaggccggacgatagtgaagacgctgttgccctgggattccgatgaatctcctgaggcctcccctggtcctccaggcccacgccggggggcgggagctggggggccccgggaggaggtggtggcccacccagggcccgaggagcaggactccctcctgcagcgcaagtcagctcggcgctgcgtcaaacagcgaccctcctatgatatcttcgaggattcggatgactcggagcccgggggcccccctgctcctcggcgtcggaccccccgagaaaatgagctgccactgccagaacctgaggagcagagccggccccgcaaacctaccctgcagcctgtgttgcagctcaaggcccgaaggcgcctggacaaggatgctttggcccctggcccctttgcttcttttcccaatggctggactggaaagcagaagtctcccgatggtgtgcaccgcgtccgtgtggattttaaggaggattgtgatttagagaacgtgtggctgatggggggcctgagtgtgctcacctctgtgccagggggccccccgatggtgtgcttgctgtgtgccagcaaaggactccacgagctggtgttctgtcaagtctgctgtgacccattccacccattctgcctggaggaggccgagcggcccctgccccagcatcacgacacctggtgctgccgtcgctgcaaattctgccacgtctgtggacgcaaaggtcgtggatccaagcacctcctggagtgcgagcgctgccgccatgcataccacccggcctgtctggggcccagctatccaacccgggccacgcgcaaacggcgccactggatctgttcagcctgtgtgcgctgtaagagctgtggggcaactccaggcaagaactgggacgtcgagtggtctggagattacagcctctgccccaggtgcacccagctatatgagaaaggaaactactgcccgatctgtacacgctgctatgaagacaacgactatgagagcaagatgatgcagtgcgcacagtgcgatcactgggtgcatgccaagtgcgaggggctctcagatgaagactacgagatcctttcaggactgccagactcggtgctgtacacctgcggaccgtgtgctggggcagcgcagccccgctggcgagaggccctgagcggggccctccaggggggcctgcgccaggtgctccagggcctgctgagctccaaggtggtgggcccactgctgctctgcacccagtgtgggccagatgggaagcaactgcacccaggaccctgcggcctgcaagctgtgagtcagcgcttcgaggatggccactacaagtctgtgcacagcttcatggaggacatggtgggcatcctcatgcggcactcggaggagggagagaccccggaccgccgggctggaggccagatgaaggggctcctgctgaagctgctagaatctgcgttcggctggttcgacgcccacgaccccaagtactggcgacggagtacccggctgccaaacggagtccttcccaatgcggtgttgcccccatccctggatcatgtctatgcgcagtggagacagcaggaaccagagaccccagaatcagggcagcctccaggggatccctcagcagcattccagggcaaggatccggctgccttctcacacctggaggacccccgtcagtgtgcactctgcctcaaatacggggatgcagactccaaggaggcggggcggctcttgtacatcgggcagaacgagtggacacacgtcaactgtgccatctggtcggcggaagtcttcgaggagaacgacggctccctcaagaatgtgcatgctgctgtggcccgagggaggcagatgcgctgcgagctctgcctgaagcctggcgccacggtgggctgctgcctgtcctcctgcctcagcaacttccacttcatgtgtgcccgggccagctactgcatcttccaggatgacaagaaagtcttctgccagaaacacactgatctcctggatggcaaggaaattgtgaaccccgatggttttgatgttctccgccgagtctatgtggacttcgagggcatcaacttcaagcggaagttcttgacggggcttgaacccgatgccatcaacgtgctcattggttccatccgcattgactccctgggtactctgtctgatctctcggactgcgagggacggctcttccccattggctaccagtgctcccgtctgtactggagcacagtggatgctcggaggcgctgctggtatcggtgccgaattctggagtatcggccatgggggccgagggaagagccagctcacctggaggctgcagaggagaaccagaccattgtgcacagccccgccccttcctcagagcccccaggtggtgaggaccccccactggacacagatgttcttgtccctggagctcctgagcgccactcgcccattcagaacctggaccctccactgcggccagattcaggcagcgcccctcctccagccccccgttctttttcgggggctcgaatcaaagtgcccaactactcgccatcccggaggcccttggggggtgtctcctttggccccctgccctcccctggaagtccatcttcactgacccaccacatccccacagtgggagacccggacttcccagctccccccagacgttcccgtcgtcccagccctttggctcccaggccgcctccatcacggtgggcctcccctcctctaaaaacctcccctcagctcagggtgccccctcctacctcagtcgtcacagccctcacacctacctcaggggagctggctccccctggcccggccccatctccaccaccccctgaagacctgggcccagacttcgaggacatggaggtggtgtcaggactgagtgctgctgacctggacttcgcggccagcctgctggggactgagcccttccaggaagagattgtagccgctggggccatggggagcagccacgggggcccgggggacagctccgaggaggagtccagccccacctcccgctacatccacttccctgtgactgtggtgtccgcccctggtctggcccccagcgctacccctggagccccccgcattgaacagctggacggcgtggacgacggcactgacagtgaggctgaggcggtgcagcagcctcggggccagggcacgcctccttcggggccaggagtagtccgggcaggggtccttggggctgcaggggacagggcccggcctcctgaggacctgccatcggaaattgtggattttgtgttgaagaacctagggggtcctggggatggaggtgctggccctagagaggagtcactccccccggcgcctcccctggctaatggcagccagccctcccaaggcctgaccgccagcccagctgaccccacccgcacatttgcctggctcccaggggccccaggggtccgggtgttaagccttggccctgcccctgagccccccaaacccgccacatccaaaatcatacttgtcaacaagctggggcaagtatttgtgaagatggctggggagggtgaacctgtcccacccccagtgaagcagccacctttgccccccaccatttcccccacggctcccacctcctggactctgcccccaggccccctcctcggcgtgctgcccgtggtcggagtggtccgccctgccccgcccccgccaccccctcccctgacgctggtgctgagcagtgggccagccagcccgccccgccaggccatccgcgtcaagagggtgtccactttctccggccggtccccgccagcacctcccccatacaaagccccccggctggatgaagatggagaggcctcagaggatacccctcaggttccagggcttggcagtggcgggtttagccgtgtgaggatgaaaacccccacagtgcgtggggtccttgacctggatcggcctggggagcccgctggggaagaaagtcctgggcccctccaggaacggtcccctttgctgccacttccggaagatggtcctccccaggtccccgatggtcccccagacctgctgcttgagtcccagtggcaccactattcaggtgaggcttcgagctctgaggaagagcctccatccccagatgataaagagaaccaggccccaaaacggactggcccacatctgcgcttcgagatcagcagtgaggatgggttcagcgttgaggcagagagcttggagggggcgtggagaactctgatcgagaaagtgcaagaggcccgagggcatgcccgactcagacatctctcctttagtggaatgagtggggcgagactcctgggcatccaccatgatgctgtcatcttcctggccgagcagctccccggagcccagcgttgccagcactataagttccgttaccaccagcagggagagggccaggaggagccgcccctgaatccccatggggctgctcgggcagaggtctatctccggaagtgcacctttgacatgttcaacttcctggcctcccagcaccgggtgctccctgagggggccacctgtgatgaggaagaggatgaggtgcagctcaggtcaaccagacgtgccaccagcctggagctgcccatggccatgcgttttcgtcaccttaagaagacgtccaaagaagctgtgggtgtctacagatcagccatccacgggcgaggcctgttctgtaagcgcaacatcgacgcgggggagatggtcatcgagtactctggcattgtcatccgctcggtgttgactgacaagcgggagaagttctacgatgggaagggcatcgggtgctatatgttccgcatggatgactttgatgtagtggacgccacgatgcatggcaatgccgcccgcttcatcaaccactcctgtgagcccaactgcttctctcgggtcatccacgtggagggccagaaacacattgttatcttcgccctgcgccgcatcctgcgtggtgaggagctcacctacgactacaagttccccatcgaggatgccagcaacaagctgccctgcaactgtggcgccaagcgctgccgtcggttccttaactgaggccgtggctgcccaccacgacccctcacacctcctgctgccgtcgctgccatcttgcccctagcctgggggctccctagcccctcccagagcatctcacccccaccctcatgttcagggtggatgtgggcatgcaggtgacaagggccctgcctccacccctccagcccatccagcaatcgccccctttctgccctgggggcccaggatgtagatattgtacaaaggtttctaaatcccttcttttctatgcacttttttatttaagaggtggggtcccaggtgggaacccccccacaataaagtctgtcaatgtttgga

SEQ ID NO: 722 - DNA, 8485 bp, Homo sapiens; identical to SEQ ID NO: 721
  source 1..8485: mol_type = genomic DNA

SEQ ID NO: 723 - DNA, 8419 bp, Homo sapiens
  source 1..8419: mol_type = genomic DNA
ctctcacggtgccaagatggcggcggcggcgggcggcggcagttgccccgggcctggctccgcgcggggccgcttcccgggccggccgcggggcgccggcgggggcgggggccgcggcggacggggcaacggggccgaaagagtgcgggtagctctgcggcgcggcggtggcgcgacggggccgggcggagccgagcccggggaggacacggccctgctccgtttgctggggctccgccggggcctgcgccggctccgccgcctgtgggccggcccgcgggtccagcggggccggggacggggtcggggccggggctggggcccgagtcgaggctgcgtgccggaggaggagagcagtgacggggaatccgacgaggaggagtttcagggttttcattcagatgaagatgtggcccccagttccctgcgctctgcgctccgatcccagcgagatgtggctcctacccccccaaagacccctgcccggaaacggggtgaggaaggcacagaacggatggtgcaggcactgactgaacttctccggcgggcccaggcaccccaagcaccccggagccgggcatgtgagccctccaccccccggcggtctcggggacggcccccaggacggccagcaggcccctgcaggaggaagcagcaagcagtagtggtggcagaagcagctgtgacaatccccaaacctgagcccccacctcctgtggttccagtgaaacatcagactggcagctggaaatgcaaggaggggcccggtccaggacctgggacccccaggcgtggaggacagtcaagccgtggaggccgtggaggcaggggccgcggccgaggtggtgggctcccctttgtgatcaagtttgtttcaagggccaaaaaagtaaagatgggacaattgtccttgggactcgaatcaggtcaaggtcaaggtcaacatgaggaaagttggcaggatgtcccccaaagaagagttggatctggacagggagggagcccttgctggaaaaagcaggaacagaagctggatgacgaggaagaagagaagaaagaagaagaagaaaaagacaaggagggagaagagaaggaagaaagagctgtagctgaggagatgatgccagctgcggaaaaggaagaggcaaagctgccaccaccgcctctgactcctccagccccttcacctcctccacccctcccacccccttcgacatctcctccacccccactctgccctccaccaccacccccagtgtccccaccacctctaccatcccctccaccgcctcctgcccaagaggagcaggaggaatcccctcctcctgtggtcccagctacgtgctccaggaagaggggccggcctcccctgactcccagccagcgggcggagcgggaagctgctcgggcagggccagagggcacctctcctcccactccaacccccagcaccgccacgggaggccctccggaagacagtcccaccgtggcccccaaaagcaccaccttcctgaagaatatccggcagtttattatgcctgtggtgagtgcccgctcctcccgtgtcatcaagacaccccggcgatttatggatgaagacccccccaaacccccaaaggtggaggtctcacctgtcctgcgacctcccattaccacctccccacctgttccccaggagccagcaccagtcccctctccaccacgtgccccaactcctccatctaccccagttccactccctgagaagagacggtccatcctaagggaacccacatttcgctggacctcactgacccgggagctgccccctcctcccccagcccctccacctcccccggccccctccccaccccctgctcctgccacctcctcccggaggcccctactccttcgggcccctcagtttaccccaagcgaagcccacctgaagatctacgaatcggtgcttactcctcctcctcttggggctcctgaagcccctgagccagagcctcctcctgccgatgactctccagctgagcctgagcctcgggcagtgggccgcaccaaccacctcagcctgcctcgattcgcccctgtggtcaccactcctgttaaggccgaggtgtcccctcacggggctccagctctgagcaacgggccacagacacaggctcagctactgcagcccctgcaggccttgcaaacccagctcctgccccaggcactaccgccaccacagccacagctgcagccaccgccgtcaccacagcagatgcctcccctggaaaaagcccggattgcgggcgtgggttccttgccgctgtctggggtagaggagaagatgttcagcctcctcaagagagccaaagtgcagctattcaagatcgatcagcagcagcagcagaaggtggcagcttccatgccgctgagccctggagggcagatggaggaggtggccggggctgtcaagcagatctccgacagaggccctgtccggtctgaagatgagtcggtggaagctaagagagagcggccctcaggtcccgagtcccctgtgcaaggtccccgcatcaaacatgtctgccgtcatgctgctgtggccctgggtcaggcccgggccatggtgcctgaagatgtccctcgcctcagtgccctccctctccgggatcggcaggacctcgccacagaggatacatcatcggcgtccgagactgagagtgtcccgtcacggtcccggcggggaaaggtggaggcagcaggccctgggggagaatcagagcccacaggttctggagggaccctggcccacacaccccggcgctcactgccctcccatcacggcaagaagatgcgcatggctcgatgtggacactgtcggggctgcctacgtgtgcaggactgtgggtcctgtgtcaactgcctagacaagcccaagtttgggggccctaacaccaagaagcagtgctgtgtataccggaagtgtgacaaaatagaggctcggaagatggaacgactggctaaaaaaggccggacgatagtgaagacgctgttgccctgggattccgatgaatctcctgaggcctcccctggtcctccaggcccacgccggggggcgggagctggggggccccgggaggaggtggtggcccacccagggcccgaggagcaggactccctcctgcagcgcaagtcagctcggcgctgcgtcaaacagcgaccctcctatgatatcttcgaggattcggatgactcggagcccgggggcccccctgctcctcggcgtcggaccccccgagaaaatgagctgccactgccagaacctgaggagcagagccggccccgcaaacctaccctgcagcctgtgttgcagctcaaggcccgaaggcgcctggacaaggatgctttggcccctggcccctttgcttcttttcccaatggctggactggaaagcagaagtctcccgatggtgtgcaccgcgtccgtgtggattttaaggaggattgtgatttagagaacgtgtggctgatggggggcctgagtgtgctcacctctgtgccagggggccccccgatggtgtgcttgctgtgtgccagcaaaggactccacgagctggtgttctgtcaagtctgctgtgacccattccacccattctgcctggaggaggccgagcggcccctgccccagcatcacgacacctggtgctgccgtcgctgcaaattctgccacgtctgtggacgcaaaggtcgtggatccaagcacctcctggagtgcgagcgctgccgccatgcataccacccggcctgtctggggcccagctatccaacccgggccacgcgcaaacggcgccactggatctgttcagcctgtgtgcgctgtaagagctgtggggcaactccaggcaagaactgggacgtcgagtggtctggagattacagcctctgccccaggtgcacccagctatatgagaaaggaaactactgcccgatctgtacacgctgctatgaagacaacgactatgagagcaagatgatgcagtgcgcacagtgcgatcactgggtgcatgccaagtgcgaggggctctcagatgaagactacgagatcctttcaggactgccagactcggtgctgtacacctgcggaccgtgtgctggggcagcgcagccccgctggcgagaggccctgagcggggccctccaggggggcctgcgccaggtgctccagggcctgctgagctccaaggtggtgggcccactgctgctctgcacccagtgtgggccagatgggaagcaactgcacccaggaccctgcggcctgcaagctgtgagtcagcgcttcgaggatggccactacaagtctgtgcacagcttcatggaggacatggtgggcatcctcatgcggcactcggaggagggagagaccccggaccgccgggctggaggccagatgaaggggctcctgctgaagctgctagaatctgcgttcggctggttcgacgcccacgaccccaagtactggcgacggagtacccggctgccaaacggagtccttcccaatgcggtgttgcccccatccctggatcatgtctatgcgcagtggagacagcaggaaccagagaccccagaatcagggcagcctccaggggatccctcagcagcattccagggcaaggatccggctgccttctcacacctggaggacccccgtcagtgtgcactctgcctcaaatacggggatgcagactccaaggaggcggggcggctcttgtacatcgggcagaacgagtggacacacgtcaactgtgccatctggtcggcggaagtcttcgaggagaacgacggctccctcaagaatgtgcatgctgctgtggcccgagggaggcagatgcgctgcgagctctgcctgaagcctggcgccacggtgggctgctgcctgtcctcctgcctcagcaacttccacttcatgtgtgcccgggccagctactgcatcttccaggatgacaagaaagtcttctgccagaaacacactgatctcctggatggcaaggaaattgtgaaccccgatggttttgatgttctccgccgagtctatgtggacttcgagggcatcaacttcaagcggaagttcttgacggggcttgaacccgatgccatcaacgtgctcattggttccatccgcattgactccctgggtactctgtctgatctctcggactgcgagggacggctcttccccattggctaccagtgctcccgtctgtactggagcacagtggatgctcggaggcgctgctggtatcggtgccgaattctggagtatcggccatgggggccgagggaagagccagctcacctggaggctgcagaggagaaccagaccattgtgcacagccccgccccttcctcagagcccccaggtggtgaggaccccccactggacacagatgttcttgtccctggagctcctgagcgccactcgcccattcagaacctggaccctccactgcggccagattcaggcagcgcccctcctccagccccccgttctttttcgggggctcgaatcaaagtgcccaactactcgccatcccggaggcccttggggggtgtctcctttggccccctgccctcccctggaagtccatcttcactgacccaccacatccccacagtgggagacccggacttcccagctccccccagacgttcccgtcgtcccagccctttggctcccaggccgcctccatcacggtgggcctcccctcctctaaaaacctcccctcagctcagggtgccccctcctacctcagtcgtcacagccctcacacctacctcaggggagctggctccccctggcccggccccatctccaccaccccctgaagacctgggcccagacttcgaggacatggaggtggtgtcaggactgagtgctgctgacctggacttcgcggccagcctgctggggactgagcccttccaggaagagattgtagccgctggggccatggggagcagccacgggggcccgggggacagctccgaggaggagtccagccccacctcccgctacatccacttccctgtgactgtggtgtccgcccctggtctggcccccagcgctacccctggagccccccgcattgaacagctggacggcgtggacgacggcactgacagtgaggctgaggcggtgcagcagcctcggggccagggcacgcctccttcggggccaggagtagtccgggcaggggtccttggggctgcaggggacagggcccggcctcctgaggacctgccatcggaaattgtggattttgtgttgaagaacctagggggtcctggggatggaggtgctggccctagagaggagtcactccccccggcgcctcccctggctaatggcagccagccctcccaaggcctgaccgccagcccagctgaccccacccgcacatttgcctggctcccaggggccccaggggtccgggtgttaagccttggccctgcccctgagccccccaaacccgccacatccaaaatcatacttgtcaacaagctggggcaagtatttgtgaagatggctggggagggtgaacctgtcccacccccagtgaagcagccacctttgccccccaccatttcccccacggctcccacctcctggactctgcccccaggccccctcctcggcgtgctgcccgtggtcggagtggtccgccctgccccgcccccgccaccccctcccctgacgctggtgctgagcagtgggccagccagcccgccccgccaggccatccgcgtcaagagggtgtccactttctccggccggtccccgccagcacctcccccatacaaagccccccggctggatgaagatggagaggcctcagaggatacccctcaggttccagggcttggcagtggcgggtttagccgtgtgaggatgaaaacccccacagtgcgtggggtccttgacctggatcggcctggggagcccgctggggaagaaagtcctgggcccctccaggaacggtcccctttgctgccacttccggaagatggtcctccccaggtccccgatggtcccccagacctgctgcttgagtcccagtggcaccactattcaggtgaggcttcgagctctgaggaagagcctccatccccagatgataaagagaaccaggccccaaaacggactggcccacatctgcgcttcgagatcagcagtgaggatgggttcagcgttgaggcagagagcttggagggggcgtggagaactctgatcgagaaagtgcaagaggcccgagggcatgcccgactcagacatctctcctttagtggaatgagtggggcgagactcctgggcatccaccatgatgctgtcatcttcctggccgagcagctccccggagcccagcgttgccagcactataagttccgttaccaccagcagggagagggccaggaggagccgcccctgaatccccatggggctgctcgggcagaggtctatctccggaagtgcacctttgacatgttcaacttcctggcctcccagcaccgggtgctccctgagggggccacctgtgatgaggaagaggatgaggtgcagctcaggtcaaccagacgtgccaccagcctggagctgcccatggccatgcgttttcgtcaccttaagaagacgtccaaagaagctgtgggtgtctacagatcagccatccacgggcgaggcctgttctgtaagcgcaacatcgacgcgggggagatggtcatcgagtactctggcattgtcatccgctcggtgttgactgacaagcgggagaagttctacgatgggaagggcatcgggtgctatatgttccgcatggatgactttgatgtagtggacgccacgatgcatggcaatgccgcccgcttcatcaaccactcctgtgagcccaactgcttctctcgggtcatccacgtggagggccagaaacacattgttatcttcgccctgcgccgcatcctgcgtggtgaggagctcacctacgactacaagttccccatcgaggatgccagcaacaagctgccctgcaactgtggcgccaagcgctgccgtcggttccttaactgaggccgtggctgcccaccacgacccctcacacctcctgctgccgtcgctgccatcttgcccctagcctgggggctccctagcccctcccagagcatctcacccccaccctcatgttcagggtggatgtgggcatgcaggtgacaagggccctgcctccacccctccagcccatccagcaatcgccccctttctgccctgggggcccaggatgtagatattgtacaaaggtttctaaatcccttcttttctatgcacttttttatttaagaggtggggtcccaggtgggaacccccccacaataaagtctgtcaatgtttgga

SEQ ID NO: 724 - DNA, 8485 bp, Homo sapiens; identical to SEQ ID NO: 721
  source 1..8485: mol_type = genomic DNA

SEQ ID NO: 725 - DNA, 8419 bp, Homo sapiens; identical to SEQ ID NO: 723
  source 1..8419: mol_type = genomic DNA

SEQ ID NO: 726 - DNA, 8305 bp, Homo sapiens
  source 1..8305: mol_type = genomic DNA
aggtgcggggaggaaaggagagggtgctcaggcagcgagaacagggcgcagctaacgccggggaggaggatcccgtcctcatgggtgcgggagcaacgtggcgtgggagtgatcgttctgggggagagtgggcagaagagagcgcgaggcgagcccggggccaggggcgcagggaatagtggctttggagctagcgctctgccgaccagacagtaggacacatgctggtttcgcctactgagatggcttcccacccgtaacctgcttggagattcttgacactgcctgcccctctgacatcgctgccctgagatggctctatagagccagaggactggacaggacctgcctcccgctcgtttggttccggcctcaggcttaggacaatggggtgttcctagcacccgagcgggcctcctggtcacagtgcgccttttaggtggctctcccagcgtcttcactgactttcgtgaaatagtgtcctgcgccctagtgaaactaccctgccttcacttaggcccgttttcttgaggagtgaagctgtcggccgctgtggcccctcctgtgccgcaggcgcatgcgaaacagggaccgaacgagccccgcctcgacgcctccaatcccactgatccccctgcctcggccctcgttccgagaacgaccgttccattcattcagtcttggcagtagttatttgattcgtcttctcttgtagtatactttaaagtgtgggcgatgcagttggctgtggtgctttaataaagatctgatcgatgcggagtttggtagatgtatattacagttctcgaacgtgttgcttgttttggcacactgcacagtcatttttcatgtggatttgtgactttgtcgtggaccagggaaataagtcctgtggtgtgggagtcgtaggtttagttgttatcttcgactcgtgctgtccctttttcaggaatgtaagaagcacttggcaggcttgggggctttggggctgggcagcctgatcactgaactcacggcaaatgaagaattgaccgggactgacggtgccttgggtgggttaggagtacagaagatgctgtggactattcagacatcaatgaggtggcagaagatgaaagccgaagataccagcagacgatggggagcttgcagcccctttgccactcagattatgatgaagatgactatgatgctgattgtgaagacattgattgcaagttgatgcctcctccacctccacccccgggaccaatgaagaaggataaggaccaggattctattactggtgtgtctgaaaatggagaaggcatcatcttgccctccatcattgccccttcctctttggcctcagagaaagtggacttcagtagttcctctgactcagaatctgagatgggacctcaggaagcaacacaggcagaatctgaagatggaaagctgacccttccattggctgggattatgcagcatgatgccaccaagctgttgccaagtgtcacagaactttttccagaatttcgacctggaaaggtgttacgttttctacgtctttttggaccagggaagaatgtcccatctgtttggcggagtgctcggagaaagaggaagaagaagcaccgtgagctgatacaggaagagcagatccaggaggtggagtgctcagtagaatcagaagtcagccagaagtctttgtggaactacgactacgctccaccaccacctccagagcagtgtctctctgatgatgaaatcacgatgatggctcctgtggagtccaaattttcccaatcaactggagatatagataaagtgacagataccaaaccaagagtggctgagtggcgttatgggcctgcccgactgtggtatgatatgctgggtgtccctgaagatggcagtgggtttgactatggcttcaaactgagaaagacagaacatgaacctgtgataaaatctagaatgatagaggaatttaggaaacttgaggaaaacaatggcactgatcttctggctgatgaaaacttcctgatggtgacacagctgcattgggaggatgatatcatctgggatggggaggatgtcaaacacaaagggacaaaacctcagcgtgcaagcctggcaggctggcttccttctagcatgactaggaatgcgatggcttacaatgttcagcaaggttttgcagccactcttgatgatgacaaaccttggtactccatttttcccattgacaatgaggatctggtatatggacgctgggaggacaatatcatttgggatgctcaggccatgccccggctgttggaacctcctgttttgacacttgatcccaatgatgagaacctcattttggaaattcctgatgagaaggaagaggccacctctaactccccctccaaggagagtaagaaggaatcatctctgaagaagagtcgaattctcttagggaaaacaggagtcatcaaggaggaaccacagcagaacatgtctcagccagaagtgaaagatccatggaatctctccaatgatgagtattattatcccaagcaacagggtcttcgaggcacctttggagggaatattatccagcattcaattcctgctgtggaattacggcagcccttctttcccacccacatggggcccatcaaactccggcagttccatcgcccacctctgaaaaagtactcatttggtgcactttctcagccaggtccccactcagtccaacctttgctaaagcacatcaaaaaaaaggccaagatgagagaacaagagaggcaagcttcaggtggtggagagatgttttttatgcgcacacctcaggacctcacaggcaaagatggtgatcttattcttgcagaatatagtgaggaaaatggacccttaatgatgcaggttggcatggcaaccaagataaagaactattataaacggaaacctggaaaagatcctggagcaccagattgtaaatatggggaaactgtttactgccatacatctcctttcctgggttctctccatcctggccaattgctgcaagcatttgagaacaacctttttcgtgctccaatttatcttcataagatgccagaaactgatttcttgatcattcggacaagacagggttactatattcgggaattagtggatatttttgtggttggccagcagtgtcccttgtttgaagttcctgggcctaactccaaaagggccaatacgcatattcgagactttctacaggtttttatttaccgccttttctggaaaagtaaagatcggccacggaggatacgaatggaagatataaaaaaagcctttccttcccattcagaaagcagcatccggaagaggctaaagctctgcgctgacttcaaacgcacagggatggactcaaactggtgggtgcttaagtctgattttcgtttaccaacggaagaagagatcagagctatggtgtcaccagagcagtgctgtgcttattatagcatgatagctgcagagcaacgactgaaggatgctggctatggtgagaaatccttttttgctccagaagaagaaaatgaggaagatttccagatgaagattgatgatgaagttcgcactgccccttggaacaccacaagggccttcattgctgccatgaagggcaagtgtctgctagaggtgactggggtggcagatcccacggggtgtggtgaaggattctcctatgtgaagattccaaacaaaccaacacagcagaaggatgataaagaaccgcagccagtgaagaagacagtgacaggaacagatgcagaccttcgtcgcctttccctgaaaaatgccaagcaacttctacgtaaatttggtgtgcctgaggaagagattaaaaagttgtcccgctgggaagtgattgatgtggtgcgcacaatgtcaacagaacaggctcgttctggagaggggcccatgagtaaatttgcccgtggatcaaggttttctgtggctgagcatcaagagcgttacaaagaggaatgtcagcgcatctttgacctacagaacaaggttctgtcatcaactgaagtcttatcaactgacacagacagcagctcagctgaagatagtgactttgaagaaatgggaaagaacattgagaacatgttgcagaacaagaaaaccagctctcagctttcacgtgaacgggaggaacaggagcggaaggaactacagcgaatgctactggcagcaggctcagcagcatccggaaacaatcacagagatgatgacacagcttccgtgactagccttaactcttctgccactggacgctgtctcaagatttatcgcacgtttcgagatgaagaggggaaagagtatgttcgctgtgagacagtccgaaaaccagctgtcattgatgcctatgtgcgcatacggactacaaaagatgaggaattcattcgaaaatttgccctttttgatgaacaacatcgggaagagatgcgaaaagaacggcggaggattcaagagcaactgaggcggcttaagaggaaccaggaaaaggagaagcttaagggtcctcctgagaagaagcccaagaaaatgaaggagcgtcctgacctaaaactgaaatgtggggcatgtggtgccattggacacatgaggactaacaaattctgccccctctattatcaaacaaatgcgccaccttccaaccctgttgccatgacagaagaacaggaggaggagttggaaaagacagtcattcataatgataatgaagaacttatcaaggttgaagggaccaaaattgtcttggggaaacagctaattgagagtgcggatgaggttcgcagaaaatctctggttctcaagtttcctaaacagcagcttcctccaaagaagaaacggcgagttggaaccactgttcactgtgactatttgaatagacctcataagtccatccaccggcgccgcacagaccctatggtgacgctgtcgtccatcttggagtctatcatcaatgacatgagagatcttccaaatacataccctttccacactccagtcaatgcaaaggttgtaaaggactactacaaaatcatcactcggccaatggacctacaaacactccgcgaaaacgtgcgtaaacgcctctacccatctcgggaagagttcagagagcatctggagctaattgtgaaaaatagtgcaacctacaatgggccaaaacactcattgactcagatctctcaatccatgctggatctctgtgatgaaaaactcaaagagaaagaagacaaattagctcgcttagagaaagctatcaaccccttgctggatgatgatgaccaagtggcgttttctttcattctggacaacattgtcacccagaaaatgatggcagttccagattcttggccatttcatcacccagttaataagaaatttgttccagattattacaaagtgattgtcaatccaatggatttagagaccatacgtaagaacatctccaagcacaagtatcagagtcgggagagctttctggatgatgtaaaccttattctggccaacagtgttaagtataatggacctgagagtcagtatactaagactgcccaggagattgtgaacgtctgttaccagacattgactgagtatgatgaacatttgactcaacttgagaaggatatttgtactgctaaagaagcagctttggaggaagcagaattagaaagcctggacccaatgaccccagggccctacacgcctcagcctcctgatttgtatgataccaacacatccctcagtatgtctcgagatgcctctgtatttcaagatgagagcaatatgtctgtcttggatattcccagtgccactccagaaaagcaggtaacacagatgcgccagggccgaggtaggctgggcgaggaagactctgatgtagatattgaagggtatgatgatgaggaggaggatgggaaacctaagactccagccccagaaggtgaagatggagatggtgatcttgcagatgaagaggaaggaactgtacaacagcctcaagccagtgtcctgtatgaggatttgcttatgtctgaaggagaagatgatgaggaagatgctgggagtgatgaagaaggagacaatcctttctctgctatccagctgagtgaaagtggaagtgactctgatgtgggatctggtggaataagacccaaacaaccccgcatgcttcaggagaacacaaggatggacatggaaaatgaagaaagcatgatgtcctatgagggagacggtggggaggcttcccatggtttggaggatagcaacatcagttatgggagctatgaggagcctgatcccaagtcgaacacccaagacacaagcttcagcagcatcggtgggtatgaggtatcagaggaggaagaagatgaggaggaggaagagcagcgctctgggccgagcgtactaagccaggtccacctgtcagaggacgaggaggacagtgaggatttccactccattgctggggacagtgacttggactctgatgaatgaggcttcctttgggcctccttggtcagccttccctgttctccagcctaggtggttcacctttccccaatttgttcatatttgtacagtatctgatcctgaaatcatgaaattaactaacaccttagcctttttaaaagtagtaagtaaatgataataaatcacctctcctaatcttcctggggcaatgtcaccctttgatttaaaacaaagcaaccccctttcccctaccactacggaaaagagcaagctcatttttccgtgtcctcctttatttaactccatttattgcttttggtataatttttccctggggaaggaggggaaattatgaaagaactagtaactttatgtcctcttgatgtattaggaaatttccggccaggcgtggtggctcacacctgtaatctcagcactctgggaggccgaggcgggcagatcacctgaggtcagaagttcgagaccagcttggccaacatggcgaaaccgcatctctactaaaaatacaaaaattagccaggctggagcagatgagagccctcctgctgggacagagaattgggttctagtggactctgtgctacacttaaacctgtgagacaaaccgcccattattttattatttaattatgcaatgcctagttcctaaatggattggaggcaaattaccgtaaattttgaaacagcctatatgtcagaaatgataatgttgccacctaaatgttttctgtcccccccaccctccccaggggaaatggtaggaaaatggtaagtttcttagggcaaagactgtgtcttctgtttcttttcatgcttaggatatggttctgtgcatagtaggtactcagtaaatgttcctagaatcataaaatcctcaacagatatgttactgagcatctgcttttcatgataagcactctatcagatccttgggatgcaaaggtaaataagacaaatcccttttacccaaagagctcaccatcaagttgggggagggaaagtggaattcaaaacatgttaataaatcatcatagtactgtgagataagtgcaattaagaagctagttataaagtataggggaaatagaggagtaatcatgtctgaaaagtcaggaaagtcttcctagaggtaatttttaagctgattgttttagaattagtagaagcttgccagatggaaaagtccaggcaaagtgtaacatgaatgggaaaggccacagtctagaaatggcagagtgtgttcctagtttgtttgtttgtttgtttgtacctgccttgttccaggaaggatttaatgtggtttatattccagtcctttaatgctggaagggctgagatgagactgaaagatgggcaggaagtatatcatcacaagctttgtgtttgatgttaatgtgtatgatttttatattatgggaaataagctcttagaggagtgatataatcaggtttgtgttttagaaatctgtgtaatgaatgaatgaagaaagaaattgaagaatcatgtaacatatgtgatcgcatttttgtaaaagaaccatgtgtgtttatatgtgtttatatatatacttgtgtatgcaaaggtaaaagtctgaaaggatatatgctaactgttcacaatgataaccccccaggaatgggattggaggggagggggcttctgtgtttgttatgtatgctgggtgggatattgtgcttttatttctatattgtttgaatttttttacagtatgtattatttttgtaataaaaattttaaaaaattcca

SEQ ID NO: 727 - DNA, 8209 bp, Homo sapiens
  source 1..8209: mol_type = genomic DNA
ctctcacggtgccaagatggcggcggcggcgggcggcggcagttgccccgggcctggctccgcgcggggccgcttcccgggccggccgcggggcgccggcgggggcgggggccgcggcggacggggcaacggggccgaaagagtgcgggtagctctgcggcgcggcggtggcgcgacggggccgggcggagccgagcccggggaggacacggccctgctccgtttgctggggctccgccggggcctgcgccggctccgccgcctgtgggccggcccgcgggtccagcggggccggggacggggtcggggccggggctggggcccgagtcgaggctgcgtgccggaggaggagagcagtgacggggaatccgacgaggaggagtttcagggttttcattcagatgaagatgtggcccccagttccctgcgctctgcgctccgatcccagcgaggtcgagcgccccgaggtcggggtcgcaagcataagacgaccccccttcctcctcctcgcctagcagatgtggctcctacccccccaaagacccctgcccggaaacggggtgaggaaggcacagaacggatggtgcaggcactgactgaacttctccggcgggcccaggcaccccaagcaccccggagccgggcatgtgagccctccaccccccggcggtctcggggacggcccccaggacggccagcaggcccctgcaggaggaagcagcaagcagtagtggtggcagaagcagctgtgacaatccccaaacctgagcccccacctcctgtggttccagtgaaacatcagactggcagctggaaatgcaaggaggggcccggtccaggacctgggacccccaggcgtggaggacagtcaagccgtggaggccgtggaggcaggggccgcggccgaggtggtgggctcccctttgtgatcaagtttgtttcaagggccaaaaaagtaaagatgggacaattgtccttgggactcgaatcaggtcaaggtcaaggtcaacatgaggaaagttggcaggatgtcccccaaagaagagttggatctggacagggagggagcccttgctggaaaaagcaggaacagaagctggatgacgaggaagaagagaagaaagaagaagaagaaaaagacaaggagggagaagagaaggaagaaagagctgtagctgaggagatgatgccagctgcggaaaaggaagaggcaaagctgccaccaccgcctctgactcctccagccccttcacctcctccacccctcccacccccttcgacatctcctccacccccactctgccctccaccaccacccccagtgtccccaccacctctaccatcccctccaccgcctcctgcccaagaggagcaggaggaatcccctcctcctgtggtcccagctacgtgctccaggaagaggggccggcctcccctgactcccagccagcgggcggagcgggaagctgctcgggcagggccagagggcacctctcctcccactccaacccccagcaccgccacgggaggccctccggaagacagtcccaccgtggcccccaaaagcaccaccttcctgaagaatatccggcagtttattatgcctgtggtgagtgcccgctcctcccgtgtcatcaagacaccccggcgatttatggatgaagacccccccaaacccccaaaggtggaggtctcacctgtcctgcgacctcccattaccacctccccacctgttccccaggagccagcaccagtcccctctccaccacgtgccccaactcctccatctaccccagttccactccctgagaagagacggtccatcctaagggaacccacatttcgctggacctcactgacccgggagctgccccctcctcccccagcccctccacctcccccggccccctccccaccccctgctcctgccacctcctcccggaggcccctactccttcgggcccctcagtttaccccaagcgaagcccacctgaagatctacgaatcggtgcttactcctcctcctcttggggctcctgaagcccctgagccagagcctcctcctgccgatgactctccagctgagcctgagcctcgggcagtgggccgcaccaaccacctcagcctgcctcgattcgcccctgtggtcaccactcctgttaaggccgaggtgtcccctcacggggctccagctctgagcaacgggccacagacacaggctcagctactgcagcccctgcaggccttgcaaacccagctcctgccccaggcactaccgccaccacagccacagctgcagccaccgccgtcaccacagcagatgcctcccctggaaaaagcccggattgcgggcgtgggttccttgccgctgtctggggtagaggagaagatgttcagcctcctcaagagagccaaagtgcagctattcaagatcgatcagcagcagcagcagaaggtggcagcttccatgccgctgagccctggagggcagatggaggaggtggccggggctgtcaagcagatctccgacagaggccctgtccggtctgaagatgagtcggtggaagctaagagagagcggccctcaggtcccgagtcccctgtgcaaggtccccgcatcaaacatgtctgccgtcatgctgctgtggccctgggtcaggcccgggccatggtgcctgaagatgtccctcgcctcagtgccctccctctccgggatcggcaggacctcgccacagaggatacatcatcggcgtccgagactgagagtgtcccgtcacggtcccggcggggaaaggtggaggcagcaggccctgggggagaatcagagcccacaggttctggagggaccctggcccacacaccccggcgctcactgccctcccatcacggcaagaagatgcgcatggctcgatgtggacactgtcggggctgcctacgtgtgcaggactgtgggtcctgtgtcaactgcctagacaagcccaagtttgggggccctaacaccaagaagcagtgctgtgtataccggaagtgtgacaaaatagaggctcggaagatggaacgactggctaaaaaagagctgccactgccagaacctgaggagcagagccggccccgcaaacctaccctgcagcctgtgttgcagctcaaggcccgaaggcgcctggacaaggatgctttggcccctggcccctttgcttcttttcccaatggctggactggaaagcagaagtctcccgatggtgtgcaccgcgtccgtgtggattttaaggaggattgtgatttagagaacgtgtggctgatggggggcctgagtgtgctcacctctgtgccagggggccccccgatggtgtgcttgctgtgtgccagcaaaggactccacgagctggtgttctgtcaagtctgctgtgacccattccacccattctgcctggaggaggccgagcggcccctgccccagcatcacgacacctggtgctgccgtcgctgcaaattctgccacgtctgtggacgcaaaggtcgtggatccaagcacctcctggagtgcgagcgctgccgccatgcataccacccggcctgtctggggcccagctatccaacccgggccacgcgcaaacggcgccactggatctgttcagcctgtgtgcgctgtaagagctgtggggcaactccaggcaagaactgggacgtcgagtggtctggagattacagcctctgccccaggtgcacccagctatatgagaaaggaaactactgcccgatctgtacacgctgctatgaagacaacgactatgagagcaagatgatgcagtgcgcacagtgcgatcactgggtgcatgccaagtgcgaggggctctcagatgaagactacgagatcctttcaggactgccagactcggtgctgtacacctgcggaccgtgtgctggggcagcgcagccccgctggcgagaggccctgagcggggccctccaggggggcctgcgccaggtgctccagggcctgctgagctccaaggtggtgggcccactgctgctctgcacccagtgtgggccagatgggaagcaactgcacccaggaccctgcggcctgcaagctgtgagtcagcgcttcgaggatggccactacaagtctgtgcacagcttcatggaggacatggtgggcatcctcatgcggcactcggaggagggagagaccccggaccgccgggctggaggccagatgaaggggctcctgctgaagctgctagaatctgcgttcggctggttcgacgcccacgaccccaagtactggcgacggagtacccggctgccaaacggagtccttcccaatgcggtgttgcccccatccctggatcatgtctatgcgcagtggagacagcaggaaccagagaccccagaatcagggcagcctccaggggatccctcagcagcattccagggcaaggatccggctgccttctcacacctggaggacccccgtcagtgtgcactctgcctcaaatacggggatgcagactccaaggaggcggggcggctcttgtacatcgggcagaacgagtggacacacgtcaactgtgccatctggtcggcggaagtcttcgaggagaacgacggctccctcaagaatgtgcatgctgctgtggcccgagggaggcagatgcgctgcgagctctgcctgaagcctggcgccacggtgggctgctgcctgtcctcctgcctcagcaacttccacttcatgtgtgcccgggccagctactgcatcttccaggatgacaagaaagtcttctgccagaaacacactgatctcctggatggcaaggaaattgtgaaccccgatggttttgatgttctccgccgagtctatgtggacttcgagggcatcaacttcaagcggaagttcttgacggggcttgaacccgatgccatcaacgtgctcattggttccatccgcattgactccctgggtactctgtctgatctctcggactgcgagggacggctcttccccattggctaccagtgctcccgtctgtactggagcacagtggatgctcggaggcgctgctggtatcggtgccgaattctggagtatcggccatgggggccgagggaagagccagctcacctggaggctgcagaggagaaccagaccattgtgcacagccccgccccttcctcagagcccccaggtggtgaggaccccccactggacacagatgttcttgtccctggagctcctgagcgccactcgcccattcagaacctggaccctccactgcggccagattcaggcagcgcccctcctccagccccccgttctttttcgggggctcgaatcaaagtgcccaactactcgccatcccggaggcccttggggggtgtctcctttggccccctgccctcccctggaagtccatcttcactgacccaccacatccccacagtgggagacccggacttcccagctccccccagacgttcccgtcgtcccagccctttggctcccaggccgcctccatcacggtgggcctcccctcctctaaaaacctcccctcagctcagggtgccccctcctacctcagtcgtcacagccctcacacctacctcaggggagctggctccccctggcccggccccatctccaccaccccctgaagacctgggcccagacttcgaggacatggaggtggtgtcaggactgagtgctgctgacctggacttcgcggccagcctgctggggactgagcccttccaggaagagattgtagccgctggggccatggggagcagccacgggggcccgggggacagctccgaggaggagtccagccccacctcccgctacatccacttccctgtgactgtggtgtccgcccctggtctggcccccagcgctacccctggagccccccgcattgaacagctggacggcgtggacgacggcactgacagtgaggctgaggcggtgcagcagcctcggggccagggcacgcctccttcggggccaggagtagtccgggcaggggtccttggggctgcaggggacagggcccggcctcctgaggacctgccatcggaaattgtggattttgtgttgaagaacctagggggtcctggggatggaggtgctggccctagagaggagtcactccccccggcgcctcccctggctaatggcagccagccctcccaaggcctgaccgccagcccagctgaccccacccgcacatttgcctggctcccaggggccccaggggtccgggtgttaagccttggccctgcccctgagccccccaaacccgccacatccaaaatcatacttgtcaacaagctggggcaagtatttgtgaagatggctggggagggtgaacctgtcccacccccagtgaagcagccacctttgccccccaccatttcccccacggctcccacctcctggactctgcccccaggccccctcctcggcgtgctgcccgtggtcggagtggtccgccctgccccgcccccgccaccccctcccctgacgctggtgctgagcagtgggccagccagcccgccccgccaggccatccgcgtcaagagggtgtccactttctccggccggtccccgccagcacctcccccatacaaagccccccggctggatgaagatggagaggcctcagaggatacccctcaggttccagggcttggcagtggcgggtttagccgtgtgaggatgaaaacccccacagtgcgtggggtccttgacctggatcggcctggggagcccgctggggaagaaagtcctgggcccctccaggaacggtcccctttgctgccacttccggaagatggtcctccccaggtccccgatggtcccccagacctgctgcttgagtcccagtggcaccactattcaggtgaggcttcgagctctgaggaagagcctccatccccagatgataaagagaaccaggccccaaaacggactggcccacatctgcgcttcgagatcagcagtgaggatgggttcagcgttgaggcagagagcttggagggggcgtggagaactctgatcgagaaagtgcaagaggcccgagggcatgcccgactcagacatctctcctttagtggaatgagtggggcgagactcctgggcatccaccatgatgctgtcatcttcctggccgagcagctccccggagcccagcgttgccagcactataagttccgttaccaccagcagggagagggccaggaggagccgcccctgaatccccatggggctgctcgggcagaggtctatctccggaagtgcacctttgacatgttcaacttcctggcctcccagcaccgggtgctccctgagggggccacctgtgatgaggaagaggatgaggtgcagctcaggtcaaccagacgtgccaccagcctggagctgcccatggccatgcgttttcgtcaccttaagaagacgtccaaagaagctgtgggtgtctacagatcagccatccacgggcgaggcctgttctgtaagcgcaacatcgacgcgggggagatggtcatcgagtactctggcattgtcatccgctcggtgttgactgacaagcgggagaagttctacgatgggaagggcatcgggtgctatatgttccgcatggatgactttgatgtagtggacgccacgatgcatggcaatgccgcccgcttcatcaaccactcctgtgagcccaactgcttctctcgggtcatccacgtggagggccagaaacacattgttatcttcgccctgcgccgcatcctgcgtggtgaggagctcacctacgactacaagttccccatcgaggatgccagcaacaagctgccctgcaactgtggcgccaagcgctgccgtcggttccttaactgaggccgtggctgcccaccacgacccctcacacctcctgctgccgtcgctgccatcttgcccctagcctgggggctccctagcccctcccagagcatctcacccccaccctcatgttcagggtggatgtgggcatgcaggtgacaagggccctgcctccacccctccagcccatccagcaatcgccccctttctgccctgggggcccaggatgtagatattgtacaaaggtttctaaatcccttcttttctatgcacttttttatttaagaggtggggtcccaggtgggaacccccccacaataaagtctgtcaatgtttgga

SEQ ID NO: 728 - DNA, 8419 bp, Homo sapiens; identical to SEQ ID NO: 723
  source 1..8419: mol_type = genomic DNA

SEQ ID NO: 729 - DNA, 8209 bp, Homo sapiens; identical to SEQ ID NO: 727
  source 1..8209: mol_type = genomic DNA

SEQ ID NO: 730 - DNA, 3975 bp, Homo sapiens
  source 1..3975: mol_type = genomic DNA
ccaccgcgcccggccagcagtgggtctgttttcaaccctcatgtaccctcagctctcaagcctgtgtgctcccaccccagccagtcaccagaatcacatagattttaaaacgacttatcctgggtccatccctacacatagtaaatgagatttttgctgggtagcttgggacgctatattttccaaaactccctgttgattggctgtatttgggaacccctgttgcgaaggaagatcccttatctcttcatctgtcactaatgatggtggcttgcgcactctgatggtacttacttggatgggattacagatggttccatcacacccatctgtatgaaatctcgtggtataagtgaatgtaggatgataagggacgagcctattagaggcttttgaagcaaatggatagtttaatcagattggtgtgttttttttttctgtagaactgctgtgaactagaccttgttatcaccatctgtttcgtaaattccattttcggtttaacagctggattgtgaaagatatacaaaattatccagttaaaaaactaaatttggcaagtgtgtgtgtgtttttaaaaatgactccttgaatacactgttttgattccttagacagtttctaaggctctaattttggtctaccagaaatattcagagtagtaaactgagaccagaaaggcgagttctttggcttggataactttgagagttaatagtatacatgattggcagccttcagttttatccagcaataaatctaaacagtttaaaataagtactttccccttacctcagtacagagaggccctggccactgccatgcacatctcagaagctgagcagtggggcagaaggataacttgtaatttggcatcaatgtccaacacccttgagctctggactcttttattcattccttctactttaccattctacatcttgaaccactgtgcgtgcggttcccctaagaggcagtaaagtaattgcatcagggtggagggattttatgtgctttcactttctcatttgattatttctacatcttaccgataaacttccatgaatattactgttgtaatgaggagcaaaatgttagtaaagataactttatacgtgaaaacttgaactcttaccaagaaacgtagtgtttgtgacaaggctggctgagaggatgagaatagctcatcagtactgggttggctgaaggaaacatgcatgtcagtactattttgagggcagctgagaacatctatttcaatagctttggctatattttaatagctaagagcaacatatgaatttgtctctgccaaagatggagtgaaaatttccaaaataaccaaacttttactttttttgcaatacattaggtctttcctgctgacaaacctacagtttatgaaataagtttgtggagcatatcaaagctgtgcggcagctctgtgcactccagcagatggtgtgactggttgtctgtagtcgtcttagtttccgccattgtgtcagtctgtggaatgtttgggttcatgcttattttggccaagttttccaaattctgtcttgatgtcctaaacgatgctatatttgatgaagatcatgatgagatggtgattgtgaaggacatagacatgttttccatgtgtgagcatcacttggttccatttgttggaaaggtccatattggttatcttcctaacaagcaagtccttggcctcagcaaacttgcgaggattgtagaaatctatagtagaagactacaagttcaggagcgccttacaaaacaaattgctgtagcaatcacggaagccttgcggcctgctggagtcggggtagtggttgaagcaacacacatgtgtatggtaatgcgaggtgtacagaaaatgaacagcaaaactgtgaccagcacaatgttgggtgtgttccgggaggatccaaagactcgggaagagttcctgactctcattaggagctgagcttcattcagtgtgtgtgcgttggttgccgatcgtactgccagtagcattgtctgtctgtccggtcttgtttgtacattccattttcaattgttacagatgtgaactttattccttgtcactaattatatttaaaattatttctaggaagtcaaataaatataataaagggttgagccctctactttcttcttgccacctttttgtggcaatattaaagtgaactgctaatagtgtaagtacgtgcacaaaaccactgccagataaccagaggggcctgggaagggagaagaattagtgtatttttttcaaatagtacagtaatttgcctcataagcataggagcattgggaatgagagggaactgtgcccagtatactgttttttttcttcctccaataaaagtggtgtagtgccgaaagtgctaaaatatttagtgcggtattgctctgtgaattcaagttcaacagacttcactttggtcatgtttattaaaccaccagtgacatttaaaaatatatttttagcagtcgtaatgttagtcaccaagggaaggtggtggaatgtctatgtttttgattttactgtgagttaaaaaggcacatttctaccttctattgtttttaaattcaagaatagggaattagttcctggtgttgtttacgagtgtattctcgtgtcaacatacagggatttagacatttaactctctgtgccttgataagaatatcatttagagtgtagatacttttgcctttttaaaaaagccattattttatgagacttagtactcacactgcaaataactagtcagctcagttttaactttataggtttattgagtttcctttgtgtgatccatgtagatgcctcaaaatgtttcttcttcttcttttttttaatcttataagatatttttctaagtatttccagaaacatttgagagtgcccatcattttcaggtctgcagaaccatagcttccacgcacctgaacgagcacagaatgaactgacggtggaagacattatgagctgtgtccaacgttttaaccaaagcgtatcgtaccaacgatctgtgaaaatgcactggaagcttctggtcccggtttcctttgtggtctatgtgggtcttgtcctcattgtaactccgtatagatggtataggtattttaatcctggaagctgttgccttattaatgattatcttaaaatttcctccattggggcagcgtgggccaaattaaaacaaacaaaaccgcaactcctccacagaaacacaaacacagttattccatgaagtttagtatttggttgacatagtgctcttcaaattcatcccattaccctaaaagtaataactttgatgcttgctttaactttagtcccatctctgccactttgatgctatttgggttatgatggggcaagatggcagaggtattgggtttttttgtttttttccattcctctctacttctgtttcctagctttttctttctggagtttaagtacagtgatggttggcttgagtacctttttaaatctagcccagtataaacattagcctgcttaatatttagacatttataggtagaattctgagcactcaactcatgtttggcattttaaagtaaaaacaagtgtgacttcgaggaccaaagaaattgtcagctatacatttatctttatgaactcatttatattcctttttaatgactcgttgttctaacatttcctagaagtgttcttataaaggtctaatgtatccacaggctgttgtcttattagtaaatgcaaagtaatgactttgtctgttttactctagtctttagtacttcaaaattaccttttcatatccatgatcttgagtccatttgggggatttttaagaatttgatgtatttcaatacactgttcaaaattaaattgtttaattttatgtatgagtatgtatgttcctgaaggtggtcctatttaaattattaaactattgtaacttt

SEQ ID NO: 731 - DNA, 700 bp, Homo sapiens
  source 1..700: mol_type = genomic DNA
agcctgtggccgctcccggctcggagtgtgatctaagcaggttgcgtaccttcctcaggtgactccggccacagcccattgtccgcggccaccggcggagtttagccgcagacctcgaagcgccccggggtccttcccgaacggcagcggctgcggcgggtccatggagaagggccctgtgcgggcaccggcggagaagccgcggggcgccaggtgcagcaatgggttccccgagcgggatccgccgcggcccgggcccagcaggccggcggagaagcccccgcggcccgaggccaagagcgcgcagcccgcggacggctggaagggcgagcggccccgcagcgaggaggataacgagctgaacctccctaacctggcagccgcctactcgtccatcctgagctcgctgggcgagaacccccagcggcaagggctgctcaagacgccctggagggcggcctcggccatgcagttcttcaccaagggctaccaggagaccatctcagatgtcctaaacgatgctatatttgatgaagatcatgatgagatggtgattgtgaaggacatagacatgttttccatgtgtgagcatcacttggttccatttgttggaaaggtccatattggttatcttcctaacaagcaagtccttggcctcagcaaacttgcgagaaataactgagcctcggctgggtgaggt

SEQ ID NO: 732 - DNA, 8305 bp, Homo sapiens; identical to SEQ ID NO: 726
  source 1..8305: mol_type = genomic DNA

SEQ ID NO: 733 - DNA, 1920 bp, Homo sapiens
  source 1..1920: mol_type = genomic DNA
agacggagcccggacctccacactgagccatgcccacccccgacgccaccacgccacaggccaagggcttccgcagggccgtgtctgagctggacgccaagcaggcagaggccatcatggtaagagggcagggcgccccggggcccagcctcacaggctctccgtggcctggaactgcagccccagctgcatcctacacccccaccccaaggtccccgcggttcattgggcgcaggcagagcctcatcgaggacgcccgcaaggagcgggaggcggcggtggcagcagcggccgctgcagtcccctcggagcccggggaccccctggaggctgtggcctttgaggagaaggaggggaaggccgtgctaaacctgctcttctccccgagggccaccaagccctcggcgctgtcccgagctgtgaaggtgtttgagacgtttgaagccaaaatccaccatctagagacccggcccgcccagaggccgcgagctgggggcccccacctggagtacttcgtgcgcctcgaggtgcgccgaggggacctggccgccctgctcagtggtgtgcgccaggtgtcagaggacgtgcgcagccccgcggggcccaaggtcccctggttcccaagaaaagtgtcagagctggacaagtgtcatcacctggtcaccaagttcgaccctgacctggacttggaccacccgggcttctcggaccaggtgtaccgccagcgcaggaagctgattgctgagatcgccttccagtacaggcacggcgacccgattccccgtgtggagtacaccgccgaggagattgccacctggaaggaggtctacaccacgctgaagggcctctacgccacgcacgcctgcggggagcacctggaggcctttgctttgctggagcgcttcagcggctaccgggaagacaatatcccccagctggaggacgtctcccgcttcctgaaggagcgcacgggcttccagctgcggcctgtggccggcctgctgtccgcccgggacttcctggccagcctggccttccgcgtgttccagtgcacccagtatatccgccacgcgtcctcgcccatgcactcccctgagccggactgctgccacgagctgctggggcacgtgcccatgctggccgaccgcaccttcgcgcagttctcgcaggacattggcctggcgtccctgggggcctcggatgaggaaattgagaagctgtccacgctgtactggttcacggtggagttcgggctgtgtaagcagaacggggaggtgaaggcctatggtgccgggctgctgtcctcctacggggagctcctgcactgcctgtctgaggagcctgagattcgggccttcgaccctgaggctgcggccgtgcagccctaccaagaccagacgtaccagtcagtctacttcgtgtctgagagcttcagtgacgccaaggacaagctcaggagctatgcctcacgcatccagcgccccttctccgtgaagttcgacccgtacacgctggccatcgacgtgctggacagcccccaggccgtgcggcgctccctggagggtgtccaggatgagctggacacccttgcccatgcgctgagtgccattggctaggtgcacggcgtccctgagggcccttcccaacctcccctggtcctgcactgtcccggagctcaggccctggtgaggggctgggtcccgggtgccccccatgccctccctgctgccaggctcccactgcccctgcacctgcttctcagcgcaacagctgtgtgtgcccgtggtgaggttgtgctgcctgtggtgaggtcctgtcctggctcccagggtcctgggggctgctgcactgccctccgcccttccctgacactgtctgctgccccaatcaccgtcacaataaaagaaactgtggtctcta

SEQ ID NO: 734 - DNA, 1908 bp, Homo sapiens
  source 1..1908: mol_type = genomic DNA
agacggagcccggacctccacactgagccatgcccacccccgacgccaccacgccacaggccaagggcttccgcagggccgtgtctgagctggacgccaagcaggcagaggccatcatgggcgccccggggcccagcctcacaggctctccgtggcctggaactgcagccccagctgcatcctacacccccaccccaaggtccccgcggttcattgggcgcaggcagagcctcatcgaggacgcccgcaaggagcgggaggcggcggtggcagcagcggccgctgcagtcccctcggagcccggggaccccctggaggctgtggcctttgaggagaaggaggggaaggccgtgctaaacctgctcttctccccgagggccaccaagccctcggcgctgtcccgagctgtgaaggtgtttgagacgtttgaagccaaaatccaccatctagagacccggcccgcccagaggccgcgagctgggggcccccacctggagtacttcgtgcgcctcgaggtgcgccgaggggacctggccgccctgctcagtggtgtgcgccaggtgtcagaggacgtgcgcagccccgcggggcccaaggtcccctggttcccaagaaaagtgtcagagctggacaagtgtcatcacctggtcaccaagttcgaccctgacctggacttggaccacccgggcttctcggaccaggtgtaccgccagcgcaggaagctgattgctgagatcgccttccagtacaggcacggcgacccgattccccgtgtggagtacaccgccgaggagattgccacctggaaggaggtctacaccacgctgaagggcctctacgccacgcacgcctgcggggagcacctggaggcctttgctttgctggagcgcttcagcggctaccgggaagacaatatcccccagctggaggacgtctcccgcttcctgaaggagcgcacgggcttccagctgcggcctgtggccggcctgctgtccgcccgggacttcctggccagcctggccttccgcgtgttccagtgcacccagtatatccgccacgcgtcctcgcccatgcactcccctgagccggactgctgccacgagctgctggggcacgtgcccatgctggccgaccgcaccttcgcgcagttctcgcaggacattggcctggcgtccctgggggcctcggatgaggaaattgagaagctgtccacgctgtactggttcacggtggagttcgggctgtgtaagcagaacggggaggtgaaggcctatggtgccgggctgctgtcctcctacggggagctcctgcactgcctgtctgaggagcctgagattcgggccttcgaccctgaggctgcggccgtgcagccctaccaagaccagacgtaccagtcagtctacttcgtgtctgagagcttcagtgacgccaaggacaagctcaggagctatgcctcacgcatccagcgccccttctccgtgaagttcgacccgtacacgctggccatcgacgtgctggacagcccccaggccgtgcggcgctccctggagggtgtccaggatgagctggacacccttgcccatgcgctgagtgccattggctaggtgcacggcgtccctgagggcccttcccaacctcccctggtcctgcactgtcccggagctcaggccctggtgaggggctgggtcccgggtgccccccatgccctccctgctgccaggctcccactgcccctgcacctgcttctcagcgcaacagctgtgtgtgcccgtggtgaggttgtgctgcctgtggtgaggtcctgtcctggctcccagggtcctgggggctgctgcactgccctccgcccttccctgacactgtctgctgccccaatcaccgtcacaataaaagaaactgtggtctcta

SEQ ID NO: 735 - DNA, 1839 bp, Homo sapiens
  source 1..1839: mol_type = genomic DNA
agacggagcccggacctccacactgagccatgcccacccccgacgccaccacgccacaggccaagggcttccgcagggccgtgtctgagctggacgccaagcaggcagaggccatcatggtaagagggcagtccccgcggttcattgggcgcaggcagagcctcatcgaggacgcccgcaaggagcgggaggcggcggtggcagcagcggccgctgcagtcccctcggagcccggggaccccctggaggctgtggcctttgaggagaaggaggggaaggccgtgctaaacctgctcttctccccgagggccaccaagccctcggcgctgtcccgagctgtgaaggtgtttgagacgtttgaagccaaaatccaccatctagagacccggcccgcccagaggccgcgagctgggggcccccacctggagtacttcgtgcgcctcgaggtgcgccgaggggacctggccgccctgctcagtggtgtgcgccaggtgtcagaggacgtgcgcagccccgcggggcccaaggtcccctggttcccaagaaaagtgtcagagctggacaagtgtcatcacctggtcaccaagttcgaccctgacctggacttggaccacccgggcttctcggaccaggtgtaccgccagcgcaggaagctgattgctgagatcgccttccagtacaggcacggcgacccgattccccgtgtggagtacaccgccgaggagattgccacctggaaggaggtctacaccacgctgaagggcctctacgccacgcacgcctgcggggagcacctggaggcctttgctttgctggagcgcttcagcggctaccgggaagacaatatcccccagctggaggacgtctcccgcttcctgaaggagcgcacgggcttccagctgcggcctgtggccggcctgctgtccgcccgggacttcctggccagcctggccttccgcgtgttccagtgcacccagtatatccgccacgcgtcctcgcccatgcactcccctgagccggactgctgccacgagctgctggggcacgtgcccatgctggccgaccgcaccttcgcgcagttctcgcaggacattggcctggcgtccctgggggcctcggatgaggaaattgagaagctgtccacgctgtactggttcacggtggagttcgggctgtgtaagcagaacggggaggtgaaggcctatggtgccgggctgctgtcctcctacggggagctcctgcactgcctgtctgaggagcctgagattcgggccttcgaccctgaggctgcggccgtgcagccctaccaagaccagacgtaccagtcagtctacttcgtgtctgagagcttcagtgacgccaaggacaagctcaggagctatgcctcacgcatccagcgccccttctccgtgaagttcgacccgtacacgctggccatcgacgtgctggacagcccccaggccgtgcggcgctccctggagggtgtccaggatgagctggacacccttgcccatgcgctgagtgccattggctaggtgcacggcgtccctgagggcccttcccaacctcccctggtcctgcactgtcccggagctcaggccctggtgaggggctgggtcccgggtgccccccatgccctccctgctgccaggctcccactgcccctgcacctgcttctcagcgcaacagctgtgtgtgcccgtggtgaggttgtgctgcctgtggtgaggtcctgtcctggctcccagggtcctgggggctgctgcactgccctccgcccttccctgacactgtctgctgccccaatcaccgtcacaataaaagaaactgtggtctcta

SEQ ID NO: 736 - DNA, 1432 bp, Homo sapiens
  source 1..1432: mol_type = genomic DNA
agcgccgccggcggagaacaggagcatggagggcgggctggggcgtgctgtgtgcttgctgaccggggcctcccgcggcttcggccggacgctggccccgctcctggcctcgctgctgtcgcccggctccgtgcttgtccttagcgcccgcaacgacgaggcactgcgccagctggaggccgagctgggcgccgagcggtctggcctgcgcgtggtgcgggtgcccgccgacctgggcgccgaggccggcttgcagcagctgctcggcgccctgcgcgagctcccccggcccaaggggctgcagcgactgctgcttatcaacaacgcgggctctcttggggatgtgtccaaaggcttcgtggacctgagtgactccactcaagtgaacaactactgggcactgaacttgacctccatgctctgcctgacttccagcgtcctgaaggccttcccggacagtcctggcctcaacagaaccgtggttaacatctcgtccctctgtgccctgcaacctttcaaaggctgggcgctgtactgtgcaggaaaggctgctcgtgatatgctgttccaggtcctggcgctggaggaacctaatgtgagggtgctgaactatgccccaggtcctctggacacagacatgcagcagttggcccgggagacctccgtggacccagacatgcgaaaagggctgcaggagctgaaggcaaaggggaagctggtggattgcaaggtgtcagcccagaaactgctgagcttactggaaaaggacgagttcaagtctggagcccacgtggacttctatgacaaataagcccatgtttttggcttcctgaacctttttgcccccacttttagacataccccagagccctgtggctccccacaccctgccataggggcagtcctgccttacacatagaagcattcatgcctgctgccctgccctcaggcacagccagctgtgagctcccaggtcattggccttaccagttgtcaggagtctgtgctgtgcaccctgggttataaggaggcttaggagagaggttatgggtattggtgtctctatccccaggaatagaacttaaggggtgggaagaacaggaaaagaagctggaacacagaagagaggaggttgtgtctcttgctcatagcaagcctgtgggtagaggaaagagtgatctggtgtcgaataggaggacccatgtagattcgcagatggcctggatgggaggaagggcagacggtacatgtcccagcccacatagatgccccttgctgagggtagcaggaccttctgttgaactttgtgtcctcactctgatgtctccttccttcagaatctaccacccctcccccaggctgggagaaggggctcctgggtgtctgtatacacgccaaaggcagatacaaataaaatacagattgtcctttc

SEQ ID NO: 737 - DNA, 7599 bp, Homo sapiens
  source 1..7599: mol_type = genomic DNA
atcactgctgccgccatcatgtcagacacggacagcgacgaagattccgctggaggcggcccattttctttagcgggtttccttttcggcaacatcaatggagccgggcagctggagggggaaagcgtcttggatgatgaatgtaagaagcacttggcaggcttgggggctttggggctgggcagcctgatcactgaactcacggcaaatgaagaattgaccgggactgacggtgccttggtaaatgatgaagggtgggttaggagtacagaagatgctgtggactattcagacatcaatgaggtggcagaagatgaaagccgaagataccagcagacgatggggagcttgcagcccctttgccactcagattatgatgaagatgactatgatgctgattgtgaagacattgattgcaagttgatgcctcctccacctccacccccgggaccaatgaagaaggataaggaccaggattctattactggtgtgtctgaaaatggagaaggcatcatcttgccctccatcattgccccttcctctttggcctcagagaaagtggacttcagtagttcctctgactcagaatctgagatgggacctcaggaagcaacacaggcagaatctgaagatggaaagctgacccttccattggctgggattatgcagcatgatgccaccaagctgttgccaagtgtcacagaactttttccagaatttcgacctggaaaggtgttacgttttctacgtctttttggaccagggaagaatgtcccatctgtttggcggagtgctcggagaaagaggaagaagaagcaccgtgagctgatacaggaagagcagatccaggaggtggagtgctcagtagaatcagaagtcagccagaagtctttgtggaactacgactacgctccaccaccacctccagagcagtgtctctctgatgatgaaatcacgatgatggctcctgtggagtccaaattttcccaatcaactggagatatagataaagtgacagataccaaaccaagagtggctgagtggcgttatgggcctgcccgactgtggtatgatatgctgggtgtccctgaagatggcagtgggtttgactatggcttcaaactgagaaagacagaacatgaacctgtgataaaatctagaatgatagaggaatttaggaaacttgaggaaaacaatggcactgatcttctggctgatgaaaacttcctgatggtgacacagctgcattgggaggatgatatcatctgggatggggaggatgtcaaacacaaagggacaaaacctcagcgtgcaagcctggcaggctggcttccttctagcatgactaggaatgcgatggcttacaatgttcagcaaggttttgcagccactcttgatgatgacaaaccttggtactccatttttcccattgacaatgaggatctggtatatggacgctgggaggacaatatcatttgggatgctcaggccatgccccggctgttggaacctcctgttttgacacttgatcccaatgatgagaacctcattttggaaattcctgatgagaaggaagaggccacctctaactccccctccaaggagagtaagaaggaatcatctctgaagaagagtcgaattctcttagggaaaacaggagtcatcaaggaggaaccacagcagaacatgtctcagccagaagtgaaagatccatggaatctctccaatgatgagtattattatcccaagcaacagggtcttcgaggcacctttggagggaatattatccagcattcaattcctgctgtggaattacggcagcccttctttcccacccacatggggcccatcaaactccggcagttccatcgcccacctctgaaaaagtactcatttggtgcactttctcagccaggtccccactcagtccaacctttgctaaagcacatcaaaaaaaaggccaagatgagagaacaagagaggcaagcttcaggtggtggagagatgttttttatgcgcacacctcaggacctcacaggcaaagatggtgatcttattcttgcagaatatagtgaggaaaatggacccttaatgatgcaggttggcatggcaaccaagataaagaactattataaacggaaacctggaaaagatcctggagcaccagattgtaaatatggggaaactgtttactgccatacatctcctttcctgggttctctccatcctggccaattgctgcaagcatttgagaacaacctttttcgtgctccaatttatcttcataagatgccagaaactgatttcttgatcattcggacaagacagggttactatattcgggaattagtggatatttttgtggttggccagcagtgtcccttgtttgaagttcctgggcctaactccaaaagggccaatacgcatattcgagactttctacaggtttttatttaccgccttttctggaaaagtaaagatcggccacggaggatacgaatggaagatataaaaaaagcctttccttcccattcagaaagcagcatccggaagaggctaaagctctgcgctgacttcaaacgcacagggatggactcaaactggtgggtgcttaagtctgattttcgtttaccaacggaagaagagatcagagctatggtgtcaccagagcagtgctgtgcttattatagcatgatagctgcagagcaacgactgaaggatgctggctatggtgagaaatccttttttgctccagaagaagaaaatgaggaagatttccagatgaagattgatgatgaagttcgcactgccccttggaacaccacaagggccttcattgctgccatgaagggcaagtgtctgctagaggtgactggggtggcagatcccacggggtgtggtgaaggattctcctatgtgaagattccaaacaaaccaacacagcagaaggatgataaagaaccgcagccagtgaagaagacagtgacaggaacagatgcagaccttcgtcgcctttccctgaaaaatgccaagcaacttctacgtaaatttggtgtgcctgaggaagagattaaaaagttgtcccgctgggaagtgattgatgtggtgcgcacaatgtcaacagaacaggctcgttctggagaggggcccatgagtaaatttgcccgtggatcaaggttttctgtggctgagcatcaagagcgttacaaagaggaatgtcagcgcatctttgacctacagaacaaggttctgtcatcaactgaagtcttatcaactgacacagacagcagctcagctgaagatagtgactttgaagaaatgggaaagaacattgagaacatgttgcagaacaagaaaaccagctctcagctttcacgtgaacgggaggaacaggagcggaaggaactacagcgaatgctactggcagcaggctcagcagcatccggaaacaatcacagagatgatgacacagcttccgtgactagccttaactcttctgccactggacgctgtctcaagatttatcgcacgtttcgagatgaagaggggaaagagtatgttcgctgtgagacagtccgaaaaccagctgtcattgatgcctatgtgcgcatacggactacaaaagatgaggaattcattcgaaaatttgccctttttgatgaacaacatcgggaagagatgcgaaaagaacggcggaggattcaagagcaactgaggcggcttaagaggaaccaggaaaaggagaagcttaagggtcctcctgagaagaagcccaagaaaatgaaggagcgtcctgacctaaaactgaaatgtggggcatgtggtgccattggacacatgaggactaacaaattctgccccctctattatcaaacaaatgcgccaccttccaaccctgttgccatgacagaagaacaggaggaggagttggaaaagacagtcattcataatgataatgaagaacttatcaaggttgaagggaccaaaattgtcttggggaaacagctaattgagagtgcggatgaggttcgcagaaaatctctggttctcaagtttcctaaacagcagcttcctccaaagaagaaacggcgagttggaaccactgttcactgtgactatttgaatagacctcataagtccatccaccggcgccgcacagaccctatggtgacgctgtcgtccatcttggagtctatcatcaatgacatgagagatcttccaaatacataccctttccacactccagtcaatgcaaaggttgtaaaggactactacaaaatcatcactcggccaatggacctacaaacactccgcgaaaacgtgcgtaaacgcctctacccatctcgggaagagttcagagagcatctggagctaattgtgaaaaatagtgcaacctacaatgggccaaaacactcattgactcagatctctcaatccatgctggatctctgtgatgaaaaactcaaagagaaagaagacaaattagctcgcttagagaaagctatcaaccccttgctggatgatgatgaccaagtggcgttttctttcattctggacaacattgtcacccagaaaatgatggcagttccagattcttggccatttcatcacccagttaataagaaatttgttccagattattacaaagtgattgtcaatccaatggatttagagaccatacgtaagaacatctccaagcacaagtatcagagtcgggagagctttctggatgatgtaaaccttattctggccaacagtgttaagtataatggacctgagagtcagtatactaagactgcccaggagattgtgaacgtctgttaccagacattgactgagtatgatgaacatttgactcaacttgagaaggatatttgtactgctaaagaagcagctttggaggaagcagaattagaaagcctggacccaatgaccccagggccctacacgcctcagcctcctgatttgtatgataccaacacatccctcagtatgtctcgagatgcctctgtatttcaagatgagagcaatatgtctgtcttggatattcccagtgccactccagaaaagcaggtaacacaggaaggtgaagatggagatggtgatcttgcagatgaagaggaaggaactgtacaacagcctcaagccagtgtcctgtatgaggatttgcttatgtctgaaggagaagatgatgaggaagatgctgggagtgatgaagaaggagacaatcctttctctgctatccagctgagtgaaagtggaagtgactctgatgtgggatctggtggaataagacccaaacaaccccgcatgcttcaggagaacacaaggatggacatggaaaatgaagaaagcatgatgtcctatgagggagacggtggggaggcttcccatggtttggaggatagcaacatcagttatgggagctatgaggagcctgatcccaagtcgaacacccaagacacaagcttcagcagcatcggtgggtatgaggtatcagaggaggaagaagatgaggaggaggaagagcagcgctctgggccgagcgtactaagccaggtccacctgtcagaggacgaggaggacagtgaggatttccactccattgctggggacagtgacttggactctgatgaatgaggcttcctttgggcctccttggtcagccttccctgttctccagcctaggtggttcacctttccccaatttgttcatatttgtacagtatctgatcctgaaatcatgaaattaactaacaccttagcctttttaaaagtagtaagtaaatgataataaatcacctctcctaatcttcctggggcaatgtcaccctttgatttaaaacaaagcaaccccctttcccctaccactacggaaaagagcaagctcatttttccgtgtcctcctttatttaactccatttattgcttttggtataatttttccctggggaaggaggggaaattatgaaagaactagtaactttatgtcctcttgatgtattaggaaatttccggccaggcgtggtggctcacacctgtaatctcagcactctgggaggccgaggcgggcagatcacctgaggtcagaagttcgagaccagcttggccaacatggcgaaaccgcatctctactaaaaatacaaaaattagccaggtgtggtggcgtatgcctgttaatcctagctactcgggaggctgaggcaggagaattacttgaacccgggaggcagaggttgcagtgagtggaggtcacgccactgcactccagcctgggcgaaagagtgagattcagtctcaaaaaaaaaaaaatttccaagcatggtatcatctcacttttctaatttacaggctggagcagatgagagccctcctgctgggacagagaattgggttctagtggactctgtgctacacttaaacctgtgagacaaaccgcccattattttattatttaattatgcaatgcctagttcctaaatggattggaggcaaattaccgtaaattttgaaacagcctatatgtcagaaatgataatgttgccacctaaatgttttctgtcccccccaccctccccaggggaaatggtaggaaaatggtaagtttcttagggcaaagactgtgtcttctgtttcttttcatgcttaggatatggttctgtgcatagtaggtactcagtaaatgttcctagaatcataaaatcctcaacagatatgttactgagcatctgcttttcatgataagcactctatcagatccttgggatgcaaaggtaaataagacaaatcccttttacccaaagagctcaccatcaagttgggggagggaaagtggaattcaaaacatgttaataaatcatcatagtactgtgagataagtgcaattaagaagctagttataaagtataggggaaatagaggagtaatcatgtctgaaaagtcaggaaagtcttcctagaggtaatttttaagctgattgttttagaattagtagaagcttgccagatggaaaagtccaggcaaagtgtaacatgaatgggaaaggccacagtctagaaatggcagagtgtgttcctagtttgtttgtttgtttgtttgtacctgccttgttccaggaaggatttaatgtggtttatattccagtcctttaatgctggaagggctgagatgagactgaaagatgggcaggaagtatatcatcacaagctttgtgtttgatgttaatgtgtatgatttttatattatgggaaataagctcttagaggagtgatataatcaggtttgtgttttagaaatctgtgtaatgaatgaatgaagaaagaaattgaagaatcatgtaacatatgtgatcgcatttttgtaaaagaaccatgtgtgtttatatgtgtttatatatatacttgtgtatgcaaaggtaaaagtctgaaaggatatatgctaactgttcacaatgataaccccccaggaatgggattggaggggagggggcttctgtgtttgttatgtatgctgggtgggatattgtgcttttatttctatattgtttgaatttttttacagtatgtattatttttgtaataaaaattttaaaaaattcca

SEQ ID NO: 738 - DNA, 7536 bp, Homo sapiens
  source 1..7536: mol_type = genomic DNA
atcactgctgccgccatcatgtcagacacggacagcgacgaagattccgctggaggcggcccattttctttagcgggtttccttttcggcaacatcaatggagccgggcagctggagggggaaagcgtcttggatgatgaatgtaagaagcacttggcaggcttgggggctttggggctgggcagcctgatcactgaactcacggcaaatgaagaattgaccgggactgacggtgccttggtaaatgatgaagggtgggttaggagtacagaagatgctgtggactattcagacatcaatgaggtggcagaagatgaaagccgaagataccagcagacgatggggagcttgcagcccctttgccactcagattatgatgaagatgactatgatgctgattgtgaagacattgattgcaagttgatgcctcctccacctccacccccgggaccaatgaagaaggataaggaccaggattctattactggtgagaaagtggacttcagtagttcctctgactcagaatctgagatgggacctcaggaagcaacacaggcagaatctgaagatggaaagctgacccttccattggctgggattatgcagcatgatgccaccaagctgttgccaagtgtcacagaactttttccagaatttcgacctggaaaggtgttacgttttctacgtctttttggaccagggaagaatgtcccatctgtttggcggagtgctcggagaaagaggaagaagaagcaccgtgagctgatacaggaagagcagatccaggaggtggagtgctcagtagaatcagaagtcagccagaagtctttgtggaactacgactacgctccaccaccacctccagagcagtgtctctctgatgatgaaatcacgatgatggctcctgtggagtccaaattttcccaatcaactggagatatagataaagtgacagataccaaaccaagagtggctgagtggcgttatgggcctgcccgactgtggtatgatatgctgggtgtccctgaagatggcagtgggtttgactatggcttcaaactgagaaagacagaacatgaacctgtgataaaatctagaatgatagaggaatttaggaaacttgaggaaaacaatggcactgatcttctggctgatgaaaacttcctgatggtgacacagctgcattgggaggatgatatcatctgggatggggaggatgtcaaacacaaagggacaaaacctcagcgtgcaagcctggcaggctggcttccttctagcatgactaggaatgcgatggcttacaatgttcagcaaggttttgcagccactcttgatgatgacaaaccttggtactccatttttcccattgacaatgaggatctggtatatggacgctgggaggacaatatcatttgggatgctcaggccatgccccggctgttggaacctcctgttttgacacttgatcccaatgatgagaacctcattttggaaattcctgatgagaaggaagaggccacctctaactccccctccaaggagagtaagaaggaatcatctctgaagaagagtcgaattctcttagggaaaacaggagtcatcaaggaggaaccacagcagaacatgtctcagccagaagtgaaagatccatggaatctctccaatgatgagtattattatcccaagcaacagggtcttcgaggcacctttggagggaatattatccagcattcaattcctgctgtggaattacggcagcccttctttcccacccacatggggcccatcaaactccggcagttccatcgcccacctctgaaaaagtactcatttggtgcactttctcagccaggtccccactcagtccaacctttgctaaagcacatcaaaaaaaaggccaagatgagagaacaagagaggcaagcttcaggtggtggagagatgttttttatgcgcacacctcaggacctcacaggcaaagatggtgatcttattcttgcagaatatagtgaggaaaatggacccttaatgatgcaggttggcatggcaaccaagataaagaactattataaacggaaacctggaaaagatcctggagcaccagattgtaaatatggggaaactgtttactgccatacatctcctttcctgggttctctccatcctggccaattgctgcaagcatttgagaacaacctttttcgtgctccaatttatcttcataagatgccagaaactgatttcttgatcattcggacaagacagggttactatattcgggaattagtggatatttttgtggttggccagcagtgtcccttgtttgaagttcctgggcctaactccaaaagggccaatacgcatattcgagactttctacaggtttttatttaccgccttttctggaaaagtaaagatcggccacggaggatacgaatggaagatataaaaaaagcctttccttcccattcagaaagcagcatccggaagaggctaaagctctgcgctgacttcaaacgcacagggatggactcaaactggtgggtgcttaagtctgattttcgtttaccaacggaagaagagatcagagctatggtgtcaccagagcagtgctgtgcttattatagcatgatagctgcagagcaacgactgaaggatgctggctatggtgagaaatccttttttgctccagaagaagaaaatgaggaagatttccagatgaagattgatgatgaagttcgcactgccccttggaacaccacaagggccttcattgctgccatgaagggcaagtgtctgctagaggtgactggggtggcagatcccacggggtgtggtgaaggattctcctatgtgaagattccaaacaaaccaacacagcagaaggatgataaagaaccgcagccagtgaagaagacagtgacaggaacagatgcagaccttcgtcgcctttccctgaaaaatgccaagcaacttctacgtaaatttggtgtgcctgaggaagagattaaaaagttgtcccgctgggaagtgattgatgtggtgcgcacaatgtcaacagaacaggctcgttctggagaggggcccatgagtaaatttgcccgtggatcaaggttttctgtggctgagcatcaagagcgttacaaagaggaatgtcagcgcatctttgacctacagaacaaggttctgtcatcaactgaagtcttatcaactgacacagacagcagctcagctgaagatagtgactttgaagaaatgggaaagaacattgagaacatgttgcagaacaagaaaaccagctctcagctttcacgtgaacgggaggaacaggagcggaaggaactacagcgaatgctactggcagcaggctcagcagcatccggaaacaatcacagagatgatgacacagcttccgtgactagccttaactcttctgccactggacgctgtctcaagatttatcgcacgtttcgagatgaagaggggaaagagtatgttcgctgtgagacagtccgaaaaccagctgtcattgatgcctatgtgcgcatacggactacaaaagatgaggaattcattcgaaaatttgccctttttgatgaacaacatcgggaagagatgcgaaaagaacggcggaggattcaagagcaactgaggcggcttaagaggaaccaggaaaaggagaagcttaagggtcctcctgagaagaagcccaagaaaatgaaggagcgtcctgacctaaaactgaaatgtggggcatgtggtgccattggacacatgaggactaacaaattctgccccctctattatcaaacaaatgcgccaccttccaaccctgttgccatgacagaagaacaggaggaggagttggaaaagacagtcattcataatgataatgaagaacttatcaaggttgaagggaccaaaattgtcttggggaaacagctaattgagagtgcggatgaggttcgcagaaaatctctggttctcaagtttcctaaacagcagcttcctccaaagaagaaacggcgagttggaaccactgttcactgtgactatttgaatagacctcataagtccatccaccggcgccgcacagaccctatggtgacgctgtcgtccatcttggagtctatcatcaatgacatgagagatcttccaaatacataccctttccacactccagtcaatgcaaaggttgtaaaggactactacaaaatcatcactcggccaatggacctacaaacactccgcgaaaacgtgcgtaaacgcctctacccatctcgggaagagttcagagagcatctggagctaattgtgaaaaatagtgcaacctacaatgggccaaaacactcattgactcagatctctcaatccatgctggatctctgtgatgaaaaactcaaagagaaagaagacaaattagctcgcttagagaaagctatcaaccccttgctggatgatgatgaccaagtggcgttttctttcattctggacaacattgtcacccagaaaatgatggcagttccagattcttggccatttcatcacccagttaataagaaatttgttccagattattacaaagtgattgtcaatccaatggatttagagaccatacgtaagaacatctccaagcacaagtatcagagtcgggagagctttctggatgatgtaaaccttattctggccaacagtgttaagtataatggacctgagagtcagtatactaagactgcccaggagattgtgaacgtctgttaccagacattgactgagtatgatgaacatttgactcaacttgagaaggatatttgtactgctaaagaagcagctttggaggaagcagaattagaaagcctggacccaatgaccccagggccctacacgcctcagcctcctgatttgtatgataccaacacatccctcagtatgtctcgagatgcctctgtatttcaagatgagagcaatatgtctgtcttggatattcccagtgccactccagaaaagcaggtaacacaggaaggtgaagatggagatggtgatcttgcagatgaagaggaaggaactgtacaacagcctcaagccagtgtcctgtatgaggatttgcttatgtctgaaggagaagatgatgaggaagatgctgggagtgatgaagaaggagacaatcctttctctgctatccagctgagtgaaagtggaagtgactctgatgtgggatctggtggaataagacccaaacaaccccgcatgcttcaggagaacacaaggatggacatggaaaatgaagaaagcatgatgtcctatgagggagacggtggggaggcttcccatggtttggaggatagcaacatcagttatgggagctatgaggagcctgatcccaagtcgaacacccaagacacaagcttcagcagcatcggtgggtatgaggtatcagaggaggaagaagatgaggaggaggaagagcagcgctctgggccgagcgtactaagccaggtccacctgtcagaggacgaggaggacagtgaggatttccactccattgctggggacagtgacttggactctgatgaatgaggcttcctttgggcctccttggtcagccttccctgttctccagcctaggtggttcacctttccccaatttgttcatatttgtacagtatctgatcctgaaatcatgaaattaactaacaccttagcctttttaaaagtagtaagtaaatgataataaatcacctctcctaatcttcctggggcaatgtcaccctttgatttaaaacaaagcaaccccctttcccctaccactacggaaaagagcaagctcatttttccgtgtcctcctttatttaactccatttattgcttttggtataatttttccctggggaaggaggggaaattatgaaagaactagtaactttatgtcctcttgatgtattaggaaatttccggccaggcgtggtggctcacacctgtaatctcagcactctgggaggccgaggcgggcagatcacctgaggtcagaagttcgagaccagcttggccaacatggcgaaaccgcatctctactaaaaatacaaaaattagccaggtgtggtggcgtatgcctgttaatcctagctactcgggaggctgaggcaggagaattacttgaacccgggaggcagaggttgcagtgagtggaggtcacgccactgcactccagcctgggcgaaagagtgagattcagtctcaaaaaaaaaaaaatttccaagcatggtatcatctcacttttctaatttacaggctggagcagatgagagccctcctgctgggacagagaattgggttctagtggactctgtgctacacttaaacctgtgagacaaaccgcccattattttattatttaattatgcaatgcctagttcctaaatggattggaggcaaattaccgtaaattttgaaacagcctatatgtcagaaatgataatgttgccacctaaatgttttctgtcccccccaccctccccaggggaaatggtaggaaaatggtaagtttcttagggcaaagactgtgtcttctgtttcttttcatgcttaggatatggttctgtgcatagtaggtactcagtaaatgttcctagaatcataaaatcctcaacagatatgttactgagcatctgcttttcatgataagcactctatcagatccttgggatgcaaaggtaaataagacaaatcccttttacccaaagagctcaccatcaagttgggggagggaaagtggaattcaaaacatgttaataaatcatcatagtactgtgagataagtgcaattaagaagctagttataaagtataggggaaatagaggagtaatcatgtctgaaaagtcaggaaagtcttcctagaggtaatttttaagctgattgttttagaattagtagaagcttgccagatggaaaagtccaggcaaagtgtaacatgaatgggaaaggccacagtctagaaatggcagagtgtgttcctagtttgtttgtttgtttgtttgtacctgccttgttccaggaaggatttaatgtggtttatattccagtcctttaatgctggaagggctgagatgagactgaaagatgggcaggaagtatatcatcacaagctttgtgtttgatgttaatgtgtatgatttttatattatgggaaataagctcttagaggagtgatataatcaggtttgtgttttagaaatctgtgtaatgaatgaatgaagaaagaaattgaagaatcatgtaacatatgtgatcgcatttttgtaaaagaaccatgtgtgtttatatgtgtttatatatatacttgtgtatgcaaaggtaaaagtctgaaaggatatatgctaactgttcacaatgataaccccccaggaatgggattggaggggagggggcttctgtgtttgttatgtatgctgggtgggatattgtgcttttatttctatattgtttgaatttttttacagtatgtattatttttgtaataaaaattttaaaaaattcca

SEQ ID NO: 739 - DNA, 7605 bp, Homo sapiens
  source 1..7605: mol_type = genomic DNA
atcactgctgccgccatcatgtcagacacggacagcgacgaagattccgctggaggcggcccattttctttagcgggtttccttttcggcaacatcaatggagccgggcagctggagggggaaagcgtcttggatgatgaatgtaagaagcacttggcaggcttgggggctttggggctgggcagcctgatcactgaactcacggcaaatgaagaattgaccgggactgacggtgccttggtaaatgatgaagggtgggttaggagtacagaagatgctgtggactattcagacatcaatgaggtggcagaagatgaaagccgaagataccagcagacgatggggagcttgcagcccctttgccactcagattatgatgaagatgactatgatgctgattgtgaagacattgattgcaagttgatgcctcctccacctccacccccgggaccaatgaagaaggataaggaccaggattctattactggtgtgtctgaaaatggagaaggcatcatcttgccctccatcattgccccttcctctttggcctcagagaaagtggacttcagtagttcctctgactcagaatctgagatgggacctcaggaagcaacacaggcagaatctgaagatggaaagctgacccttccattggctgggattatgcagcatgatgccaccaagctgttgccaagtgtcacagaactttttccagaatttcgacctggaaaggtgttacgttttctacgtctttttggaccagggaagaatgtcccatctgtttggcggagtgctcggagaaagaggaagaagaagcaccgtgagctgatacaggaagagcagatccaggaggtggagtgctcagtagaatcagaagtcagccagaagtctttgtggaactacgactacgctccaccaccacctccagagcagtgtctctctgatgatgaaatcacgatgatggctcctgtggagtccaaattttcccaatcaactggagatatagataaagtgacagataccaaaccaagagtggctgagtggcgttatgggcctgcccgactgtggtatgatatgctgggtgtccctgaagatggcagtgggtttgactatggcttcaaactgagaaagacagaacatgaacctgtgataaaatctagaatgatagaggaatttaggaaacttgaggaaaacaatggcactgatcttctggctgatgaaaacttcctgatggtgacacagctgcattgggaggatgatatcatctgggatggggaggatgtcaaacacaaagggacaaaacctcagcgtgcaagcctggcaggctggcttccttctagcatgactaggaatgcgatggcttacaatgttcagcaaggttttgcagccactcttgatgatgacaaaccttggtactccatttttcccattgacaatgaggatctggtatatggacgctgggaggacaatatcatttgggatgctcaggccatgccccggctgttggaacctcctgttttgacacttgatcccaatgatgagaacctcattttggaaattcctgatgagaaggaagaggccacctctaactccccctccaaggagagtaagaaggaatcatctctgaagaagagtcgaattctcttagggaaaacaggagtcatcaaggaggaaccacagcagaacatgtctcagccagaagtgaaagatccatggaatctctccaatgatgagtattattatcccaagcaacagggtcttcgaggcacctttggagggaatattatccagcattcaattcctgctgtggaattacggcagcccttctttcccacccacatggggcccatcaaactccggcagttccatcgcccacctctgaaaaagtactcatttggtgcactttctcagccaggtccccactcagtccaacctttgctaaagcacatcaaaaaaaaggccaagatgagagaacaagagaggcaagcttcaggtggtggagagatgttttttatgcgcacacctcaggacctcacaggcaaagatggtgatcttattcttgcagaatatagtgaggaaaatggacccttaatgatgcaggttggcatggcaaccaagataaagaactattataaacggaaacctggaaaagatcctggagcaccagattgtaaatatggggaaactgtttactgccatacatctcctttcctgggttctctccatcctggccaattgctgcaagcatttgagaacaacctttttcgtgctccaatttatcttcataagatgccagaaactgatttcttgatcattcggacaagacagggttactatattcgggaattagtggatatttttgtggttggccagcagtgtcccttgtttgaagttcctgggcctaactccaaaagggccaatacgcatattcgagactttctacaggtttttatttaccgccttttctggaaaagtaaagatcggccacggaggatacgaatggaagatataaaaaaagcctttccttcccattcagaaagcagcatccggaagaggctaaagctctgcgctgacttcaaacgcacagggatggactcaaactggtgggtgcttaagtctgattttcgtttaccaacggaagaagagatcagagctatggtgtcaccagagcagtgctgtgcttattatagcatgatagctgcagagcaacgactgaaggatgctggctatggtgagaaatccttttttgctccagaagaagaaaatgaggaagatttccagatgaagattgatgatgaagttcgcactgccccttggaacaccacaagggccttcattgctgccatgaagggcaagtgtctgctagaggtgactggggtggcagatcccacggggtgtggtgaaggattctcctatgtgaagattccaaacaaaccaacacagcagaaggatgataaagaaccgcagccagtgaagaagacagtgacaggaacagatgcagaccttcgtcgcctttccctgaaaaatgccaagcaacttctacgtaaatttggtgtgcctgaggaagagattaaaaagttgtcccgctgggaagtgattgatgtggtgcgcacaatgtcaacagaacaggctcgttctggagaggggcccatgagtaaatttgcccgtggatcaaggttttctgtggctgagcatcaagagcgttacaaagaggaatgtcagcgcatctttgacctacagaacaaggttctgtcatcaactgaagtcttatcaactgacacagacagcagctcagctgaagatagtgactttgaagaaatgggaaagaacattgagaacatgttgcagaacaagaaaaccagctctcagctttcacgtgaacgggaggaacaggagcggaaggaactacagcgaatgctactggcagcaggctcagcagcatccggaaacaatcacagagatgatgacacagcttccgtgactagccttaactcttctgccactggacgctgtctcaagatttatcgcacgtttcgagatgaagaggggaaagagtatgttcgctgtgagacagtccgaaaaccagctgtcattgatgcctatgtgcgcatacggactacaaaagatgaggaattcattcgaaaatttgccctttttgatgaacaacatcgggaagagatgcgaaaagaacggcggaggattcaagagcaactgaggcggcttaagaggaaccaggaaaaggagaagcttaagggtcctcctgagaagaagcccaagaaaatgaaggagcgtcctgacctaaaactgaaatgtggggcatgtggtgccattggacacatgaggactaacaaattctgccccctctattatcaaacaaatgcgccaccttccaaccctgttgccatgacagaagaacaggaggaggagttggaaaagacagtcattcataatgataatgaagaacttatcaaggttgaagggaccaaaattgtcttggggaaacagctaattgagagtgcggatgaggttcgcagaaaatctctggttctcaagtttcctaaacagcagcttcctccaaagaagaaacggcgagttggaaccactgttcactgtgactatttgaatagacctcataagtccatccaccggcgccgcacagaccctatggtgacgctgtcgtccatcttggagtctatcatcaatgacatgagagatcttccaaatacataccctttccacactccagtcaatgcaaaggttgtaaaggactactacaaaatcatcactcggccaatggacctacaaacactccgcgaaaacgtgcgtaaacgcctctacccatctcgggaagagttcagagagcatctggagctaattgtgaaaaatagtgcaacctacaatgggccaaaacactcattgactcagatctctcaatccatgctggatctctgtgatgaaaaactcaaagagaaagaagacaaattagctcgcttagagaaagctatcaaccccttgctggatgatgatgaccaagtggcgttttctttcattctggacaacattgtcacccagaaaatgatggcagttccagattcttggccatttcatcacccagttaataagaaatttgttccagattattacaaagtgattgtcaatccaatggatttagagaccatacgtaagaacatctccaagcacaagtatcagagtcgggagagctttctggatgatgtaaaccttattctggccaacagtgttaagtataatggacctgagagtcagtatactaagactgcccaggagattgtgaacgtctgttaccagacattgactgagtatgatgaacatttgactcaacttgagaaggatatttgtactgctaaagaagcagctttggaggaagcagaattagaaagcctggacccaatgaccccagggccctacacgcctcaggctaagcctcctgatttgtatgataccaacacatccctcagtatgtctcgagatgcctctgtatttcaagatgagagcaatatgtctgtcttggatattcccagtgccactccagaaaagcaggtaacacaggaaggtgaagatggagatggtgatcttgcagatgaagaggaaggaactgtacaacagcctcaagccagtgtcctgtatgaggatttgcttatgtctgaaggagaagatgatgaggaagatgctgggagtgatgaagaaggagacaatcctttctctgctatccagctgagtgaaagtggaagtgactctgatgtgggatctggtggaataagacccaaacaaccccgcatgcttcaggagaacacaaggatggacatggaaaatgaagaaagcatgatgtcctatgagggagacggtggggaggcttcccatggtttggaggatagcaacatcagttatgggagctatgaggagcctgatcccaagtcgaacacccaagacacaagcttcagcagcatcggtgggtatgaggtatcagaggaggaagaagatgaggaggaggaagagcagcgctctgggccgagcgtactaagccaggtccacctgtcagaggacgaggaggacagtgaggatttccactccattgctggggacagtgacttggactctgatgaatgaggcttcctttgggcctccttggtcagccttccctgttctccagcctaggtggttcacctttccccaatttgttcatatttgtacagtatctgatcctgaaatcatgaaattaactaacaccttagcctttttaaaagtagtaagtaaatgataataaatcacctctcctaatcttcctggggcaatgtcaccctttgatttaaaacaaagcaaccccctttcccctaccactacggaaaagagcaagctcatttttccgtgtcctcctttatttaactccatttattgcttttggtataatttttccctggggaaggaggggaaattatgaaagaactagtaactttatgtcctcttgatgtattaggaaatttccggccaggcgtggtggctcacacctgtaatctcagcactctgggaggccgaggcgggcagatcacctgaggtcagaagttcgagaccagcttggccaacatggcgaaaccgcatctctactaaaaatacaaaaattagccaggtgtggtggcgtatgcctgttaatcctagctactcgggaggctgaggcaggagaattacttgaacccgggaggcagaggttgcagtgagtggaggtcacgccactgcactccagcctgggcgaaagagtgagattcagtctcaaaaaaaaaaaaatttccaagcatggtatcatctcacttttctaatttacaggctggagcagatgagagccctcctgctgggacagagaattgggttctagtggactctgtgctacacttaaacctgtgagacaaaccgcccattattttattatttaattatgcaatgcctagttcctaaatggattggaggcaaattaccgtaaattttgaaacagcctatatgtcagaaatgataatgttgccacctaaatgttttctgtcccccccaccctccccaggggaaatggtaggaaaatggtaagtttcttagggcaaagactgtgtcttctgtttcttttcatgcttaggatatggttctgtgcatagtaggtactcagtaaatgttcctagaatcataaaatcctcaacagatatgttactgagcatctgcttttcatgataagcactctatcagatccttgggatgcaaaggtaaataagacaaatcccttttacccaaagagctcaccatcaagttgggggagggaaagtggaattcaaaacatgttaataaatcatcatagtactgtgagataagtgcaattaagaagctagttataaagtataggggaaatagaggagtaatcatgtctgaaaagtcaggaaagtcttcctagaggtaatttttaagctgattgttttagaattagtagaagcttgccagatggaaaagtccaggcaaagtgtaacatgaatgggaaaggccacagtctagaaatggcagagtgtgttcctagtttgtttgtttgtttgtttgtacctgccttgttccaggaaggatttaatgtggtttatattccagtcctttaatgctggaagggctgagatgagactgaaagatgggcaggaagtatatcatcacaagctttgtgtttgatgttaatgtgtatgatttttatattatgggaaataagctcttagaggagtgatataatcaggtttgtgttttagaaatctgtgtaatgaatgaatgaagaaagaaattgaagaatcatgtaacatatgtgatcgcatttttgtaaaagaaccatgtgtgtttatatgtgtttatatatatacttgtgtatgcaaaggtaaaagtctgaaaggatatatgctaactgttcacaatgataaccccccaggaatgggattggaggggagggggcttctgtgtttgttatgtatgctgggtgggatattgtgcttttatttctatattgtttgaatttttttacagtatgtattatttttgtaataaaaattttaaaaaattcca

SEQ ID NO: 740 - DNA, 6516 bp, Homo sapiens
  source 1..6516: mol_type = genomic DNA
atcactgctgccgccatcatgtcagacacggacagcgacgaagattccgctggaggcggcccattttctttagcgggtttccttttcggcaacatcaatggagccgggcagctggagggggaaagcgtcttggatgatgaatgtaagaagcacttggcaggcttgggggctttggggctgggcagcctgatcactgaactcacggcaaatgaagaattgaccgggactgacggtgccttggtaaatgatgaagggtgggttaggagtacagaagatgctgtggactattcagacatcaatgaggtggcagaagatgaaagccgaagataccagcagacgatggggagcttgcagcccctttgccactcagattatgatgaagatgactatgatgctgattgtgaagacattgattgcaagttgatgcctcctccacctccacccccgggaccaatgaagaaggataaggaccaggattctattactggtgtgtctgaaaatggagaaggcatcatcttgccctccatcattgccccttcctctttggcctcagagaaagtggacttcagtagttcctctgactcagaatctgagatgggacctcaggaagcaacacaggcagaatctgaagatggaaagctgacccttccattggctgggattatgcagcatgatgccaccaagctgttgccaagtgtcacagaactttttccagaatttcgacctggaaaggtgttacgttttctacgtctttttggaccagggaagaatgtcccatctgtttggcggagtgctcggagaaagaggaagaagaagcaccgtgagctgatacaggaagagcagatccaggaggtggagtgctcagtagaatcagaagtcagccagaagtctttgtggaactacgactacgctccaccaccacctccagagcagtgtctctctgatgatgaaatcacgatgatggctcctgtggagtccaaattttcccaatcaactggagatatagataaagtgacagataccaaaccaagagtggctgagtggcgttatgggcctgcccgactgtggtatgatatgctgggtgtccctgaagatggcagtgggtttgactatggcttcaaactgagaaagacagaacatgaacctgtgataaaatctagaatgatagaggaatttaggaaacttgaggaaaacaatggcactgatcttctggctgatgaaaacttcctgatggtgacacagctgcattgggaggatgatatcatctgggatggggaggatgtcaaacacaaagggacaaaacctcagcgtgcaagcctggcaggctggcttccttctagcatgactaggaatgcgatggcttacaatgttcagcaaggttttgcagccactcttgatgatgacaaaccttggtactccatttttcccattgacaatgaggatctggtatatggacgctgggaggacaatatcatttgggatgctcaggccatgccccggctgttggaacctcctgttttgacacttgatcccaatgatgagaacctcattttggaaattcctgatgagaaggaagaggccacctctaactccccctccaaggagagtaagaaggaatcatctctgaagaagagtcgaattctcttagggaaaacaggagtcatcaaggaggaaccacagcagaacatgtctcagccagaagtgaaagatccatggaatctctccaatgatgagtattattatcccaagcaacagggtcttcgaggcacctttggagggaatattatccagcattcaattcctgctgtggaattacggcagcccttctttcccacccacatggggcccatcaaactccggcagttccatcgcccacctctgaaaaagtactcatttggtgcactttctcagccaggtccccactcagtccaacctttgctaaagcacatcaaaaaaaaggccaagatgagagaacaagagaggcaagcttcaggtggtggagagatgttttttatgcgcacacctcaggacctcacaggcaaagatggtgatcttattcttgcagaatatagtgaggaaaatggacccttaatgatgcaggttggcatggcaaccaagataaagaactattataaacggaaacctggaaaagatcctggagcaccagattgtaaatatggggaaactgtttactgccatacatctcctttcctgggttctctccatcctggccaattgctgcaagcatttgagaacaacctttttcgtgctccaatttatcttcataagatgccagaaactgatttcttgatcattcggacaagacagggttactatattcgggaattagtggatatttttgtggttggccagcagtgtcccttgtttgaagttcctgggcctaactccaaaagggccaatacgcatattcgagactttctacaggtttttatttaccgccttttctggaaaagtaaagatcggccacggaggatacgaatggaagatataaaaaaagcctttccttcccattcagaaagcagcatccggaagaggctaaagctctgcgctgacttcaaacgcacagggatggactcaaactggtgggtgcttaagtctgattttcgtttaccaacggaagaagagatcagagctatggtgtcaccagagcagtgctgtgcttattatagcatgatagctgcagagcaacgactgaaggatgctggctatggtgagaaatccttttttgctccagaagaagaaaatgaggaagatttccagatgaagattgatgatgaagttcgcactgccccttggaacaccacaagggccttcattgctgccatgaagggcaagtgtctgctagaggtgactggggtggcagatcccacggggtgtggtgaaggattctcctatgtgaagattccaaacaaaccaacacagcagaaggatgataaagaaccgcagccagtgaagaagacagtgacaggaacagatgcagaccttcgtcgcctttccctgaaaaatgccaagcaacttctacgtaaatttggtgtgcctgaggaagagattaaaaagttgtcccgctgggaagtgattgatgtggtgcgcacaatgtcaacagaacaggctcgttctggagaggggcccatgagtaaatttgcccgtggatcaaggttttctgtggctgagcatcaagagcgttacaaagaggaatgtcagcgcatctttgacctacagaacaaggttctgtcatcaactgaagtcttatcaactgacacagacagcagctcagctgaagatagtgactttgaagaaatgggaaagaacattgagaacatgttgcagaacaagaaaaccagctctcagctttcacgtgaacgggaggaacaggagcggaaggaactacagcgaatgctactggcagcaggctcagcagcatccggaaacaatcacagagatgatgacacagcttccgtgactagccttaactcttctgccactggacgctgtctcaagatttatcgcacgtttcgagatgaagaggggaaagagtatgttcgctgtgagacagtccgaaaaccagctgtcattgatgcctatgtgcgcatacggactacaaaagatgaggaattcattcgaaaatttgccctttttgatgaacaacatcgggaagagatgcgaaaagaacggcggaggattcaagagcaactgaggcggcttaagaggaaccaggaaaaggagaagcttaagggtcctcctgagaagaagcccaagaaaatgaaggagcgtcctgacctaaaactgaaatgtggggcatgtggtgccattggacacatgaggactaacaaattctgccccctctattatcaaacaaatgcgccaccttccaaccctgttgccatgacagaagaacaggaggaggagttggaaaagacagtcattcataatgataatgaagaacttatcaaggttgaagggaccaaaattgtcttggggaaacagctaattgagagtgcggatgaggttcgcagaaaatctctggttctcaagtttcctaaacagcagcttcctccaaagaagaaacggcgagttggaaccactgttcactgtgactatttgaatagacctcataagtccatccaccggcgccgcacagaccctatggtgacgctgtcgtccatcttggagtctatcatcaatgacatgagagatcttccaaatacataccctttccacactccagtcaatgcaaaggttgtaaaggactactacaaaatcatcactcggccaatggacctacaaacactccgcgaaaacgtgcgtaaacgcctctacccatctcgggaagagttcagagagcatctggagctaattgtgaaaaatagtgcaacctacaatgggccaaaacactcattgactcagatctctcaatccatgctggatctctgtgatgaaaaactcaaagagaaagaagacaaattagctcgcttagagaaagctatcaaccccttgctggatgatgatgaccaagtggcgttttctttcattctggacaacattgtcacccagaaaatgatggcagttccagattcttggccatttcatcacccagttaataagaaatttgttccagattattacaaagtgattgtcaatccaatggatttagagaccatacgtaagaacatctccaagcacaagtatcagagtcgggagagctttctggatgatgtaaaccttattctggccaacagtgttaagtataatggacctgagagtcagtatactaagactgcccaggagattgtgaacgtctgttaccagacattgactgagtatgatgaacatttgactcaacttgagaaggatatttgtactgctaaagaagcagctttggaggaagcagaattagaaagcctggacccaatgaccccagggccctacacgcctcagcctcctgatttgtatgataccaacacatccctcagtatgtctcgagatgcctctgtatttcaagatgagagcaatatgtctgtcttggatattcccagtgccactccagaaaagcaggtaacacagatgcgccagggccgaggtaggctgggcgaggaagactctgatgtagatattgaagggtatgatgatgaggaggaggatgggaaacctaagactccagccccagaaggtgaagatggagatggtgatcttgcagatgaagaggaaggaactgtacaacagcctcaagccagtgtcctgtatgaggatttgcttatgtctgaaggagaagatgatgaggaagatgctgggagtgatgaagaaggagacaatcctttctctgctatccagctgagtgaaagtggaagtgactctgatgtgggatctggtggaataagacccaaacaaccccgcatgcttcaggagaacacaaggatggacatggaaaatgaagaaagcatgatgtcctatgagggagacggtggggaggcttcccatggtttggaggatagcaacatcaggtaccaatgaacaagccattcagagatggatccacaaagatctctggagcaacgaccaggtcctgctctacccgattctcagctttggggatagaattcccagaaacatctgtgtccggagttggttccttccagtgggttcttggtcttgctgacttcaagaatgaagccgtggaccttcgcgcttcaggctgaagatagtgaaaatccgtgccagacttggattggaagaatgaaccaaggctttgagtctcttcgtctcatctccgttttgatacgtgtctccttagtttgtaagccaaggagaggactacagtgaggattgtggagggaagtggaccttattggtctttgagctctcacatctttaaagactgttggtgctgagagaaaaagtatcctcatctggcagaactcccatagggtgtgctccccttgctgttctgcttttgttttgcagaaagctgcctttttcaatgtactcattaggctttcattgttttttccttttttacctttttcatctttcactgttgatatcacaggtggccatatctttaccagtgcagctaccaaataagaaatcatcttttccacattcactagttagtgatggttgttgtactaccatgaaatcagtttcttctttacttttattcaggttacaagatttctggaaggttttaagatcaattttaattagtctttgtgactggttacttcatccaggggaccaatttctctctggaatattagtcccgcacccctggagagcctgtgcggctgcatctccctccggaggtggttctggagttggttccttttggtgggttcctggtctcgctgacttcaagaatgaagccacggaccttcacggtgagtgttacagctcttaaaggtggcacggactcaaagagtgagcagcagcaagattcattgtgaagacggaaagaacacagcttccacggtgtggaaagagacccgagtgggttgctac

SEQ ID NO: 741 - DNA, 6507 bp, Homo sapiens
  source 1..6507: mol_type = genomic DNA
atcactgctgccgccatcatgtcagacacggacagcgacgaagattccgctggaggcggcccattttctttagcgggtttccttttcggcaacatcaatggagccgggcagctggagggggaaagcgtcttggatgatgaatgtaagaagcacttggcaggcttgggggctttggggctgggcagcctgatcactgaactcacggcaaatgaagaattgaccgggactgacggtgccttggtaaatgatgaagggtgggttaggagtacagaagatgctgtggactattcagacatcaatgaggtggcagaagatgaaagccgaagataccagcagacgatggggagcttgcagcccctttgccactcagattatgatgaagatgactatgatgctgattgtgaagacattgattgcaagttgatgcctcctccacctccacccccgggaccaatgaagaaggataaggaccaggattctattactggtgtgtctgaaaatggagaaggcatcatcttgccctccatcattgccccttcctctttggcctcagagaaagtggacttcagtagttcctctgactcagaatctgagatgggacctcaggaagcaacacaggcagaatctgaagatggaaagctgacccttccattggctgggattatgcagcatgatgccaccaagctgttgccaagtgtcacagaactttttccagaatttcgacctggaaaggtgttacgttttctacgtctttttggaccagggaagaatgtcccatctgtttggcggagtgctcggagaaagaggaagaagaagcaccgtgagctgatacaggaagagcagatccaggaggtggagtgctcagtagaatcagaagtcagccagaagtctttgtggaactacgactacgctccaccaccacctccagagcagtgtctctctgatgatgaaatcacgatgatggctcctgtggagtccaaattttcccaatcaactggagatatagataaagtgacagataccaaaccaagagtggctgagtggcgttatgggcctgcccgactgtggtatgatatgctgggtgtccctgaagatggcagtgggtttgactatggcttcaaactgagaaagacagaacatgaacctgtgataaaatctagaatgatagaggaatttaggaaacttgaggaaaacaatggcactgatcttctggctgatgaaaacttcctgatggtgacacagctgcattgggaggatgatatcatctgggatggggaggatgtcaaacacaaagggacaaaacctcagcgtgcaagcctggcaggctggcttccttctagcatgactaggaatgcgatggcttacaatgttcagcaaggttttgcagccactcttgatgatgacaaaccttggtactccatttttcccattgacaatgaggatctggtatatggacgctgggaggacaatatcatttgggatgctcaggccatgccccggctgttggaacctcctgttttgacacttgatcccaatgatgagaacctcattttggaaattcctgatgagaaggaagaggccacctctaactccccctccaaggagagtaagaaggaatcatctctgaagaagagtcgaattctcttagggaaaacaggagtcatcaaggaggaaccacagcagaacatgtctcagccagaagtgaaagatccatggaatctctccaatgatgagtattattatcccaagcaacagggtcttcgaggcacctttggagggaatattatccagcattcaattcctgctgtggaattacggcagcccttctttcccacccacatggggcccatcaaactccggcagttccatcgcccacctctgaaaaagtactcatttggtgcactttctcagccaggtccccactcagtccaacctttgctaaagcacatcaaaaaaaaggccaagatgagagaacaagagaggcaagcttcaggtggtggagagatgttttttatgcgcacacctcaggacctcacaggcaaagatggtgatcttattcttgcagaatatagtgaggaaaatggacccttaatgatgcaggttggcatggcaaccaagataaagaactattataaacggaaacctggaaaagatcctggagcaccagattgtaaatatggggaaactgtttactgccatacatctcctttcctgggttctctccatcctggccaattgctgcaagcatttgagaacaacctttttcgtgctccaatttatcttcataagatgccagaaactgatttcttgatcattcggacaagacagggttactatattcgggaattagtggatatttttgtggttggccagcagtgtcccttgtttgaagttcctgggcctaactccaaaagggccaatacgcatattcgagactttctacaggtttttatttaccgccttttctggaaaagtaaagatcggccacggaggatacgaatggaagatataaaaaaagcctttccttcccattcagaaagcagcatccggaagaggctaaagctctgcgctgacttcaaacgcacagggatggactcaaactggtgggtgcttaagtctgattttcgtttaccaacggaagaagagatcagagctatggtgtcaccagagcagtgctgtgcttattatagcatgatagctgcagagcaacgactgaaggatgctggctatggtgagaaatccttttttgctccagaagaagaaaatgaggaagatttccagatgaagattgatgatgaagttcgcactgccccttggaacaccacaagggccttcattgctgccatgaagggcaagtgtctgctagaggtgactggggtggcagatcccacggggtgtggtgaaggattctcctatgtgaagattccaaacaaaccaacacagcagaaggatgataaagaaccgcagccagtgaagaagacagtgacaggaacagatgcagaccttcgtcgcctttccctgaaaaatgccaagcaacttctacgtaaatttggtgtgcctgaggaagagattaaaaagttgtcccgctgggaagtgattgatgtggtgcgcacaatgtcaacagaacaggctcgttctggagaggggcccatgagtaaatttgcccgtggatcaaggttttctgtggctgagcatcaagagcgttacaaagaggaatgtcagcgcatctttgacctacagaacaaggttctgtcatcaactgaagtcttatcaactgacacagacagcagctcagctgaagatagtgactttgaagaaatgggaaagaacattgagaacatgttgcagaacaagaaaaccagctctcagctttcacgtgaacgggaggaacaggagcggaaggaactacagcgaatgctactggcagcaggctcagcagcatccggaaacaatcacagagatgatgacacagcttccgtgactagccttaactcttctgccactggacgctgtctcaagatttatcgcacgtttcgagatgaagaggggaaagagtatgttcgctgtgagacagtccgaaaaccagctgtcattgatgcctatgtgcgcatacggactacaaaagatgaggaattcattcgaaaatttgccctttttgatgaacaacatcgggaagagatgcgaaaagaacggcggaggattcaagagcaactgaggcggcttaagaggaaccaggaaaaggagaagcttaagggtcctcctgagaagaagcccaagaaaatgaaggagcgtcctgacctaaaactgaaatgtggggcatgtggtgccattggacacatgaggactaacaaattctgccccctctattatcaaacaaatgcgccaccttccaaccctgttgccatgacagaagaacaggaggaggagttggaaaagacagtcattcataatgataatgaagaacttatcaaggttgaagggaccaaaattgtcttggggaaacagctaattgagagtgcggatgaggttcgcagaaaatctctggttctcaagtttcctaaacagcagcttcctccaaagaagaaacggcgagttggaaccactgttcactgtgactatttgaatagacctcataagtccatccaccggcgccgcacagaccctatggtgacgctgtcgtccatcttggagtctatcatcaatgacatgagagatcttccaaatacataccctttccacactccagtcaatgcaaaggttgtaaaggactactacaaaatcatcactcggccaatggacctacaaacactccgcgaaaacgtgcgtaaacgcctctacccatctcgggaagagttcagagagcatctggagctaattgtgaaaaatagtgcaacctacaatgggccaaaacactcattgactcagatctctcaatccatgctggatctctgtgatgaaaaactcaaagagaaagaagacaaattagctcgcttagagaaagctatcaaccccttgctggatgatgatgaccaagtggcgttttctttcattctggacaacattgtcacccagaaaatgatggcagttccagattcttggccatttcatcacccagttaataagaaatttgttccagattattacaaagtgattgtcaatccaatggatttagagaccatacgtaagaacatctccaagcacaagtatcagagtcgggagagctttctggatgatgtaaaccttattctggccaacagtgttaagtataatggacctgagagtcagtatactaagactgcccaggagattgtgaacgtctgttaccagacattgactgagtatgatgaacatttgactcaacttgagaaggatatttgtactgctaaagaagcagctttggaggaagcagaattagaaagcctggacccaatgaccccagggccctacacgcctcagcctcctgatttgtatgataccaacacatccctcagtatgtctcgagatgcctctgtatttcaagatgagagcaatatgtctgtcttggatattcccagtgccactccagaaaagcagatgcgccagggccgaggtaggctgggcgaggaagactctgatgtagatattgaagggtatgatgatgaggaggaggatgggaaacctaagactccagccccagaaggtgaagatggagatggtgatcttgcagatgaagaggaaggaactgtacaacagcctcaagccagtgtcctgtatgaggatttgcttatgtctgaaggagaagatgatgaggaagatgctgggagtgatgaagaaggagacaatcctttctctgctatccagctgagtgaaagtggaagtgactctgatgtgggatctggtggaataagacccaaacaaccccgcatgcttcaggagaacacaaggatggacatggaaaatgaagaaagcatgatgtcctatgagggagacggtggggaggcttcccatggtttggaggatagcaacatcaggtaccaatgaacaagccattcagagatggatccacaaagatctctggagcaacgaccaggtcctgctctacccgattctcagctttggggatagaattcccagaaacatctgtgtccggagttggttccttccagtgggttcttggtcttgctgacttcaagaatgaagccgtggaccttcgcgcttcaggctgaagatagtgaaaatccgtgccagacttggattggaagaatgaaccaaggctttgagtctcttcgtctcatctccgttttgatacgtgtctccttagtttgtaagccaaggagaggactacagtgaggattgtggagggaagtggaccttattggtctttgagctctcacatctttaaagactgttggtgctgagagaaaaagtatcctcatctggcagaactcccatagggtgtgctccccttgctgttctgcttttgttttgcagaaagctgcctttttcaatgtactcattaggctttcattgttttttccttttttacctttttcatctttcactgttgatatcacaggtggccatatctttaccagtgcagctaccaaataagaaatcatcttttccacattcactagttagtgatggttgttgtactaccatgaaatcagtttcttctttacttttattcaggttacaagatttctggaaggttttaagatcaattttaattagtctttgtgactggttacttcatccaggggaccaatttctctctggaatattagtcccgcacccctggagagcctgtgcggctgcatctccctccggaggtggttctggagttggttccttttggtgggttcctggtctcgctgacttcaagaatgaagccacggaccttcacggtgagtgttacagctcttaaaggtggcacggactcaaagagtgagcagcagcaagattcattgtgaagacggaaagaacacagcttccacggtgtggaaagagacccgagtgggttgctac

SEQ ID NO: 742 - DNA, 6414 bp, Homo sapiens
  source 1..6414: mol_type = genomic DNA
atcactgctgccgccatcatgtcagacacggacagcgacgaagattccgctggaggcggcccattttctttagcgggtttccttttcggcaacatcaatggagccgggcagctggagggggaaagcgtcttggatgatgaatgtaagaagcacttggcaggcttgggggctttggggctgggcagcctgatcactgaactcacggcaaatgaagaattgaccgggactgacggtgccttggtaaatgatgaagggtgggttaggagtacagaagatgctgtggactattcagacatcaatgaggtggcagaagatgaaagccgaagataccagcagacgatggggagcttgcagcccctttgccactcagattatgatgaagatgactatgatgctgattgtgaagacattgattgcaagttgatgcctcctccacctccacccccgggaccaatgaagaaggataaggaccaggattctattactggtgtgtctgaaaatggagaaggcatcatcttgccctccatcattgccccttcctctttggcctcagagaaagtggacttcagtagttcctctgactcagaatctgagatgggacctcaggaagcaacacaggcagaatctgaagatggaaagctgacccttccattggctgggattatgcagcatgatgccaccaagctgttgccaagtgtcacagaactttttccagaatttcgacctggaaaggtgttacgttttctacgtctttttggaccagggaagaatgtcccatctgtttggcggagtgctcggagaaagaggaagaagaagcaccgtgagctgatacaggaagagcagatccaggaggtggagtgctcagtagaatcagaagtcagccagaagtctttgtggaactacgactacgctccaccaccacctccagagcagtgtctctctgatgatgaaatcacgatgatggctcctgtggagtccaaattttcccaatcaactggagatatagataaagtgacagataccaaaccaagagtggctgagtggcgttatgggcctgcccgactgtggtatgatatgctgggtgtccctgaagatggcagtgggtttgactatggcttcaaactgagaaagacagaacatgaacctgtgataaaatctagaatgatagaggaatttaggaaacttgaggaaaacaatggcactgatcttctggctgatgaaaacttcctgatggtgacacagctgcattgggaggatgatatcatctgggatggggaggatgtcaaacacaaagggacaaaacctcagcgtgcaagcctggcaggctggcttccttctagcatgactaggaatgcgatggcttacaatgttcagcaaggttttgcagccactcttgatgatgacaaaccttggtactccatttttcccattgacaatgaggatctggtatatggacgctgggaggacaatatcatttgggatgctcaggccatgccccggctgttggaacctcctgttttgacacttgatcccaatgatgagaacctcattttggaaattcctgatgagaaggaagaggccacctctaactccccctccaaggagagtaagaaggaatcatctctgaagaagagtcgaattctcttagggaaaacaggagtcatcaaggaggaaccacagcagaacatgtctcagccagaagtgaaagatccatggaatctctccaatgatgagtattattatcccaagcaacagggtcttcgaggcacctttggagggaatattatccagcattcaattcctgctgtggaattacggcagcccttctttcccacccacatggggcccatcaaactccggcagttccatcgcccacctctgaaaaagtactcatttggtgcactttctcagccaggtccccactcagtccaacctttgctaaagcacatcaaaaaaaaggccaagatgagagaacaagagaggcaagcttcaggtggtggagagatgttttttatgcgcacacctcaggacctcacaggcaaagatggtgatcttattcttgcagaatatagtgaggaaaatggacccttaatgatgcaggttggcatggcaaccaagataaagaactattataaacggaaacctggaaaagatcctggagcaccagattgtaaatatggggaaactgtttactgccatacatctcctttcctgggttctctccatcctggccaattgctgcaagcatttgagaacaacctttttcgtgctccaatttatcttcataagatgccagaaactgatttcttgatcattcggacaagacagggttactatattcgggaattagtggatatttttgtggttggccagcagtgtcccttgtttgaagttcctgggcctaactccaaaagggccaatacgcatattcgagactttctacaggtttttatttaccgccttttctggaaaagtaaagatcggccacggaggatacgaatggaagatataaaaaaagcctttccttcccattcagaaagcagcatccggaagaggctaaagctctgcgctgacttcaaacgcacagggatggactcaaactggtgggtgcttaagtctgattttcgtttaccaacggaagaagagatcagagctatggtgtcaccagagcagtgctgtgcttattatagcatgatagctgcagagcaacgactgaaggatgctggctatggtgagaaatccttttttgctccagaagaagaaaatgaggaagatttccagatgaagattgatgatgaagttcgcactgccccttggaacaccacaagggccttcattgctgccatgaagggcaagtgtctgctagaggtgactggggtggcagatcccacggggtgtggtgaaggattctcctatgtgaagattccaaacaaaccaacacagcagaaggatgataaagaaccgcagccagtgaagaagacagtgacaggaacagatgcagaccttcgtcgcctttccctgaaaaatgccaagcaacttctacgtaaatttggtgtgcctgaggaagagattaaaaagttgtcccgctgggaagtgattgatgtggtgcgcacaatgtcaacagaacaggctcgttctggagaggggcccatgagtaaatttgcccgtggatcaaggttttctgtggctgagcatcaagagcgttacaaagaggaatgtcagcgcatctttgacctacagaacaaggttctgtcatcaactgaagtcttatcaactgacacagacagcagctcagctgaagatagtgactttgaagaaatgggaaagaacattgagaacatgttgcagaacaagaaaaccagctctcagctttcacgtgaacgggaggaacaggagcggaaggaactacagcgaatgctactggcagcaggctcagcagcatccggaaacaatcacagagatgatgacacagcttccgtgactagccttaactcttctgccactggacgctgtctcaagatttatcgcacgtttcgagatgaagaggggaaagagtatgttcgctgtgagacagtccgaaaaccagctgtcattgatgcctatgtgcgcatacggactacaaaagatgaggaattcattcgaaaatttgccctttttgatgaacaacatcgggaagagatgcgaaaagaacggcggaggattcaagagcaactgaggcggcttaagaggaaccaggaaaaggagaagcttaagggtcctcctgagaagaagcccaagaaaatgaaggagcgtcctgacctaaaactgaaatgtggggcatgtggtgccattggacacatgaggactaacaaattctgccccctctattatcaaacaaatgcgccaccttccaaccctgttgccatgacagaagaacaggaggaggagttggaaaagacagtcattcataatgataatgaagaacttatcaaggttgaagggaccaaaattgtcttggggaaacagctaattgagagtgcggatgaggttcgcagaaaatctctggttctcaagtttcctaaacagcagcttcctccaaagaagaaacggcgagttggaaccactgttcactgtgactatttgaatagacctcataagtccatccaccggcgccgcacagaccctatggtgacgctgtcgtccatcttggagtctatcatcaatgacatgagagatcttccaaatacataccctttccacactccagtcaatgcaaaggttgtaaaggactactacaaaatcatcactcggccaatggacctacaaacactccgcgaaaacgtgcgtaaacgcctctacccatctcgggaagagttcagagagcatctggagctaattgtgaaaaatagtgcaacctacaatgggccaaaacactcattgactcagatctctcaatccatgctggatctctgtgatgaaaaactcaaagagaaagaagacaaattagctcgcttagagaaagctatcaaccccttgctggatgatgatgaccaagtggcgttttctttcattctggacaacattgtcacccagaaaatgatggcagttccagattcttggccatttcatcacccagttaataagaaatttgttccagattattacaaagtgattgtcaatccaatggatttagagaccatacgtaagaacatctccaagcacaagtatcagagtcgggagagctttctggatgatgtaaaccttattctggccaacagtgttaagtataatggacctgagagtcagtatactaagactgcccaggagattgtgaacgtctgttaccagacattgactgagtatgatgaacatttgactcaacttgagaaggatatttgtactgctaaagaagcagctttggaggaagcagaattagaaagcctggacccaatgaccccagggccctacacgcctcagcctcctgatttgtatgataccaacacatccctcagtatgtctcgagatgcctctgtatttcaagatgagagcaatatgtctgtcttggatattcccagtgccactccagaaaagcaggtaacacaggaaggtgaagatggagatggtgatcttgcagatgaagaggaaggaactgtacaacagcctcaagccagtgtcctgtatgaggatttgcttatgtctgaaggagaagatgatgaggaagatgctgggagtgatgaagaaggagacaatcctttctctgctatccagctgagtgaaagtggaagtgactctgatgtgggatctggtggaataagacccaaacaaccccgcatgcttcaggagaacacaaggatggacatggaaaatgaagaaagcatgatgtcctatgagggagacggtggggaggcttcccatggtttggaggatagcaacatcaggtaccaatgaacaagccattcagagatggatccacaaagatctctggagcaacgaccaggtcctgctctacccgattctcagctttggggatagaattcccagaaacatctgtgtccggagttggttccttccagtgggttcttggtcttgctgacttcaagaatgaagccgtggaccttcgcgcttcaggctgaagatagtgaaaatccgtgccagacttggattggaagaatgaaccaaggctttgagtctcttcgtctcatctccgttttgatacgtgtctccttagtttgtaagccaaggagaggactacagtgaggattgtggagggaagtggaccttattggtctttgagctctcacatctttaaagactgttggtgctgagagaaaaagtatcctcatctggcagaactcccatagggtgtgctccccttgctgttctgcttttgttttgcagaaagctgcctttttcaatgtactcattaggctttcattgttttttccttttttacctttttcatctttcactgttgatatcacaggtggccatatctttaccagtgcagctaccaaataagaaatcatcttttccacattcactagttagtgatggttgttgtactaccatgaaatcagtttcttctttacttttattcaggttacaagatttctggaaggttttaagatcaattttaattagtctttgtgactggttacttcatccaggggaccaatttctctctggaatattagtcccgcacccctggagagcctgtgcggctgcatctccctccggaggtggttctggagttggttccttttggtgggttcctggtctcgctgacttcaagaatgaagccacggaccttcacggtgagtgttacagctcttaaaggtggcacggactcaaagagtgagcagcagcaagattcattgtgaagacggaaagaacacagcttccacggtgtggaaagagacccgagtgggttgctac

SEQ ID NO: 743 - DNA, 6420 bp, Homo sapiens
  source 1..6420: mol_type = genomic DNA
atcactgctgccgccatcatgtcagacacggacagcgacgaagattccgctggaggcggcccattttctttagcgggtttccttttcggcaacatcaatggagccgggcagctggagggggaaagcgtcttggatgatgaatgtaagaagcacttggcaggcttgggggctttggggctgggcagcctgatcactgaactcacggcaaatgaagaattgaccgggactgacggtgccttggtaaatgatgaagggtgggttaggagtacagaagatgctgtggactattcagacatcaatgaggtggcagaagatgaaagccgaagataccagcagacgatggggagcttgcagcccctttgccactcagattatgatgaagatgactatgatgctgattgtgaagacattgattgcaagttgatgcctcctccacctccacccccgggaccaatgaagaaggataaggaccaggattctattactggtgtgtctgaaaatggagaaggcatcatcttgccctccatcattgccccttcctctttggcctcagagaaagtggacttcagtagttcctctgactcagaatctgagatgggacctcaggaagcaacacaggcagaatctgaagatggaaagctgacccttccattggctgggattatgcagcatgatgccaccaagctgttgccaagtgtcacagaactttttccagaatttcgacctggaaaggtgttacgttttctacgtctttttggaccagggaagaatgtcccatctgtttggcggagtgctcggagaaagaggaagaagaagcaccgtgagctgatacaggaagagcagatccaggaggtggagtgctcagtagaatcagaagtcagccagaagtctttgtggaactacgactacgctccaccaccacctccagagcagtgtctctctgatgatgaaatcacgatgatggctcctgtggagtccaaattttcccaatcaactggagatatagataaagtgacagataccaaaccaagagtggctgagtggcgttatgggcctgcccgactgtggtatgatatgctgggtgtccctgaagatggcagtgggtttgactatggcttcaaactgagaaagacagaacatgaacctgtgataaaatctagaatgatagaggaatttaggaaacttgaggaaaacaatggcactgatcttctggctgatgaaaacttcctgatggtgacacagctgcattgggaggatgatatcatctgggatggggaggatgtcaaacacaaagggacaaaacctcagcgtgcaagcctggcaggctggcttccttctagcatgactaggaatgcgatggcttacaatgttcagcaaggttttgcagccactcttgatgatgacaaaccttggtactccatttttcccattgacaatgaggatctggtatatggacgctgggaggacaatatcatttgggatgctcaggccatgccccggctgttggaacctcctgttttgacacttgatcccaatgatgagaacctcattttggaaattcctgatgagaaggaagaggccacctctaactccccctccaaggagagtaagaaggaatcatctctgaagaagagtcgaattctcttagggaaaacaggagtcatcaaggaggaaccacagcagaacatgtctcagccagaagtgaaagatccatggaatctctccaatgatgagtattattatcccaagcaacagggtcttcgaggcacctttggagggaatattatccagcattcaattcctgctgtggaattacggcagcccttctttcccacccacatggggcccatcaaactccggcagttccatcgcccacctctgaaaaagtactcatttggtgcactttctcagccaggtccccactcagtccaacctttgctaaagcacatcaaaaaaaaggccaagatgagagaacaagagaggcaagcttcaggtggtggagagatgttttttatgcgcacacctcaggacctcacaggcaaagatggtgatcttattcttgcagaatatagtgaggaaaatggacccttaatgatgcaggttggcatggcaaccaagataaagaactattataaacggaaacctggaaaagatcctggagcaccagattgtaaatatggggaaactgtttactgccatacatctcctttcctgggttctctccatcctggccaattgctgcaagcatttgagaacaacctttttcgtgctccaatttatcttcataagatgccagaaactgatttcttgatcattcggacaagacagggttactatattcgggaattagtggatatttttgtggttggccagcagtgtcccttgtttgaagttcctgggcctaactccaaaagggccaatacgcatattcgagactttctacaggtttttatttaccgccttttctggaaaagtaaagatcggccacggaggatacgaatggaagatataaaaaaagcctttccttcccattcagaaagcagcatccggaagaggctaaagctctgcgctgacttcaaacgcacagggatggactcaaactggtgggtgcttaagtctgattttcgtttaccaacggaagaagagatcagagctatggtgtcaccagagcagtgctgtgcttattatagcatgatagctgcagagcaacgactgaaggatgctggctatggtgagaaatccttttttgctccagaagaagaaaatgaggaagatttccagatgaagattgatgatgaagttcgcactgccccttggaacaccacaagggccttcattgctgccatgaagggcaagtgtctgctagaggtgactggggtggcagatcccacggggtgtggtgaaggattctcctatgtgaagattccaaacaaaccaacacagcagaaggatgataaagaaccgcagccagtgaagaagacagtgacaggaacagatgcagaccttcgtcgcctttccctgaaaaatgccaagcaacttctacgtaaatttggtgtgcctgaggaagagattaaaaagttgtcccgctgggaagtgattgatgtggtgcgcacaatgtcaacagaacaggctcgttctggagaggggcccatgagtaaatttgcccgtggatcaaggttttctgtggctgagcatcaagagcgttacaaagaggaatgtcagcgcatctttgacctacagaacaaggttctgtcatcaactgaagtcttatcaactgacacagacagcagctcagctgaagatagtgactttgaagaaatgggaaagaacattgagaacatgttgcagaacaagaaaaccagctctcagctttcacgtgaacgggaggaacaggagcggaaggaactacagcgaatgctactggcagcaggctcagcagcatccggaaacaatcacagagatgatgacacagcttccgtgactagccttaactcttctgccactggacgctgtctcaagatttatcgcacgtttcgagatgaagaggggaaagagtatgttcgctgtgagacagtccgaaaaccagctgtcattgatgcctatgtgcgcatacggactacaaaagatgaggaattcattcgaaaatttgccctttttgatgaacaacatcgggaagagatgcgaaaagaacggcggaggattcaagagcaactgaggcggcttaagaggaaccaggaaaaggagaagcttaagggtcctcctgagaagaagcccaagaaaatgaaggagcgtcctgacctaaaactgaaatgtggggcatgtggtgccattggacacatgaggactaacaaattctgccccctctattatcaaacaaatgcgccaccttccaaccctgttgccatgacagaagaacaggaggaggagttggaaaagacagtcattcataatgataatgaagaacttatcaaggttgaagggaccaaaattgtcttggggaaacagctaattgagagtgcggatgaggttcgcagaaaatctctggttctcaagtttcctaaacagcagcttcctccaaagaagaaacggcgagttggaaccactgttcactgtgactatttgaatagacctcataagtccatccaccggcgccgcacagaccctatggtgacgctgtcgtccatcttggagtctatcatcaatgacatgagagatcttccaaatacataccctttccacactccagtcaatgcaaaggttgtaaaggactactacaaaatcatcactcggccaatggacctacaaacactccgcgaaaacgtgcgtaaacgcctctacccatctcgggaagagttcagagagcatctggagctaattgtgaaaaatagtgcaacctacaatgggccaaaacactcattgactcagatctctcaatccatgctggatctctgtgatgaaaaactcaaagagaaagaagacaaattagctcgcttagagaaagctatcaaccccttgctggatgatgatgaccaagtggcgttttctttcattctggacaacattgtcacccagaaaatgatggcagttccagattcttggccatttcatcacccagttaataagaaatttgttccagattattacaaagtgattgtcaatccaatggatttagagaccatacgtaagaacatctccaagcacaagtatcagagtcgggagagctttctggatgatgtaaaccttattctggccaacagtgttaagtataatggacctgagagtcagtatactaagactgcccaggagattgtgaacgtctgttaccagacattgactgagtatgatgaacatttgactcaacttgagaaggatatttgtactgctaaagaagcagctttggaggaagcagaattagaaagcctggacccaatgaccccagggccctacacgcctcaggctaagcctcctgatttgtatgataccaacacatccctcagtatgtctcgagatgcctctgtatttcaagatgagagcaatatgtctgtcttggatattcccagtgccactccagaaaagcaggtaacacaggaaggtgaagatggagatggtgatcttgcagatgaagaggaaggaactgtacaacagcctcaagccagtgtcctgtatgaggatttgcttatgtctgaaggagaagatgatgaggaagatgctgggagtgatgaagaaggagacaatcctttctctgctatccagctgagtgaaagtggaagtgactctgatgtgggatctggtggaataagacccaaacaaccccgcatgcttcaggagaacacaaggatggacatggaaaatgaagaaagcatgatgtcctatgagggagacggtggggaggcttcccatggtttggaggatagcaacatcaggtaccaatgaacaagccattcagagatggatccacaaagatctctggagcaacgaccaggtcctgctctacccgattctcagctttggggatagaattcccagaaacatctgtgtccggagttggttccttccagtgggttcttggtcttgctgacttcaagaatgaagccgtggaccttcgcgcttcaggctgaagatagtgaaaatccgtgccagacttggattggaagaatgaaccaaggctttgagtctcttcgtctcatctccgttttgatacgtgtctccttagtttgtaagccaaggagaggactacagtgaggattgtggagggaagtggaccttattggtctttgagctctcacatctttaaagactgttggtgctgagagaaaaagtatcctcatctggcagaactcccatagggtgtgctccccttgctgttctgcttttgttttgcagaaagctgcctttttcaatgtactcattaggctttcattgttttttccttttttacctttttcatctttcactgttgatatcacaggtggccatatctttaccagtgcagctaccaaataagaaatcatcttttccacattcactagttagtgatggttgttgtactaccatgaaatcagtttcttctttacttttattcaggttacaagatttctggaaggttttaagatcaattttaattagtctttgtgactggttacttcatccaggggaccaatttctctctggaatattagtcccgcacccctggagagcctgtgcggctgcatctccctccggaggtggttctggagttggttccttttggtgggttcctggtctcgctgacttcaagaatgaagccacggaccttcacggtgagtgttacagctcttaaaggtggcacggactcaaagagtgagcagcagcaagattcattgtgaagacggaaagaacacagcttccacggtgtggaaagagacccgagtgggttgctac

SEQ ID NO: 744 - DNA, 6442 bp, Homo sapiens
  source 1..6442: mol_type = genomic DNA
atcactgctgccgccatcatgtcagacacggacagcgacgaagattccgctggaggcggcccattttctttagcgggtttccttttcggcaacatcaatggagccgggcagctggagggggaaagcgtcttggatgatgaatgtaagaagcacttggcaggcttgggggctttggggctgggcagcctgatcactgaactcacggcaaatgaagaattgaccgggactgacggtgccttggtaaatgatgaagggtgggttaggagtacagaagatgctgtggactattcagacatcaatgaggtggcagaagatgaaagccgaagataccagcagacgatggggagcttgcagcccctttgccactcagattatgatgaagatgactatgatgctgattgtgaagacattgattgcaagttgatgcctcctccacctccacccccgggaccaatgaagaaggataaggaccaggattctattactggtgtgtctgaaaatggagaaggcatcatcttgccctccatcattgccccttcctctttggcctcagagaaagtggacttcagtagttcctctgactcagaatctgagatgggacctcaggaagcaacacaggcagaatctgaagatggaaagctgacccttccattggctgggattatgcagcatgatgccaccaagctgttgccaagtgtcacagaactttttccagaatttcgacctggaaaggtgttacgttttctacgtctttttggaccagggaagaatgtcccatctgtttggcggagtgctcggagaaagaggaagaagaagcaccgtgagctgatacaggaagagcagatccaggaggtggagtgctcagtagaatcagaagtcagccagaagtctttgtggaactacgactacgctccaccaccacctccagagcagtgtctctctgatgatgaaatcacgatgatggctcctgtggagtccaaattttcccaatcaactggagatatagataaagtgacagataccaaaccaagagtggctgagtggcgttatgggcctgcccgactgtggtatgatatgctgggtgtccctgaagatggcagtgggtttgactatggcttcaaactgagaaagacagaacatgaacctgtgataaaatctagaatgatagaggaatttaggaaacttgaggaaaacaatggcactgatcttctggctgatgaaaacttcctgatggtgacacagctgcattgggaggatgatatcatctgggatggggaggatgtcaaacacaaagggacaaaacctcagcgtgcaagcctggcaggctggcttccttctagcatgactaggaatgcgatggcttacaatgttcagcaaggttttgcagccactcttgatgatgacaaaccttggtactccatttttcccattgacaatgaggatctggtatatggacgctgggaggacaatatcatttgggatgctcaggccatgccccggctgttggaacctcctgttttgacacttgatcccaatgatgagaacctcattttggaaattcctgatgagaaggaagaggccacctctaactccccctccaaggagagtaagaaggaatcatctctgaagaagagtcgaattctcttagggaaaacaggagtcatcaaggaggaaccacagcagaacatgtctcagccagaagtgaaagatccatggaatctctccaatgatgagtattattatcccaagcaacagggtcttcgaggcacctttggagggaatattatccagcattcaattcctgctgtggaattacggcagcccttctttcccacccacatggggcccatcaaactccggcagttccatcgcccacctctgaaaaagtactcatttggtgcactttctcagccaggtccccactcagtccaacctttgctaaagcacatcaaaaaaaaggccaagatgagagaacaagagaggcaagcttcaggtggtggagagatgttttttatgcgcacacctcaggacctcacaggcaaagatggtgatcttattcttgcagaatatagtgaggaaaatggacccttaatgatgcaggttggcatggcaaccaagataaagaactattataaacggaaacctggaaaagatcctggagcaccagattgtaaatatggggaaactgtttactgccatacatctcctttcctgggttctctccatcctggccaattgctgcaagcatttgagaacaacctttttcgtgctccaatttatcttcataagatgccagaaactgatttcttgatcattcggacaagacagggttactatattcgggaattagtggatatttttgtggttggccagcagtgtcccttgtttgaagttcctgggcctaactccaaaagggccaatacgcatattcgagactttctacaggtttttatttaccgccttttctggaaaagtaaagatcggccacggaggatacgaatggaagatataaaaaaagcctttccttcccattcagaaagcagcatccggaagaggctaaagctctgcgctgacttcaaacgcacagggatggactcaaactggtgggtgcttaagtctgattttcgtttaccaacggaagaagagatcagagctatggtgtcaccagagcagtgctgtgcttattatagcatgatagctgcagagcaacgactgaaggatgctggctatggtgagaaatccttttttgctccagaagaagaaaatgaggaagatttccagatgaagattgatgatgaagttcgcactgccccttggaacaccacaagggccttcattgctgccatgaagggcaagtgtctgctagaggtgactggggtggcagatcccacggggtgtggtgaaggattctcctatgtgaagattccaaacaaaccaacacagcagaaggatgataaagaaccgcagccagtgaagaagacagtgacaggaacagatgcagaccttcgtcgcctttccctgaaaaatgccaagcaacttctacgtaaatttggtgtgcctgaggaagagattaaaaagttgtcccgctgggaagtgattgatgtggtgcgcacaatgtcaacagaacaggctcgttctggagaggggcccatgagtaaatttgcccgtggatcaaggttttctgtggctgagcatcaagagcgttacaaagaggaatgtcagcgcatctttgacctacagaacaaggttctgtcatcaactgaagtcttatcaactgacacagacagcagctcagctgaagatagtgactttgaagaaatgggaaagaacattgagaacatgttgcagaacaagaaaaccagctctcagctttcacgtgaacgggaggaacaggagcggaaggaactacagcgaatgctactggcagcaggctcagcagcatccggaaacaatcacagagatgatgacacagcttccgtgactagccttaactcttctgccactggacgctgtctcaagatttatcgcacgtttcgagatgaagaggggaaagagtatgttcgctgtgagacagtccgaaaaccagctgtcattgatgcctatgtgcgcatacggactacaaaagatgaggaattcattcgaaaatttgccctttttgatgaacaacatcgggaagagatgcgaaaagaacggcggaggattcaagagcaactgaggcggcttaagaggaaccaggaaaaggagaagcttaagggtcctcctgagaagaagcccaagaaaatgaaggagcgtcctgacctaaaactgaaatgtggggcatgtggtgccattggacacatgaggactaacaaattctgccccctctattatcaaacaaatgcgccaccttccaaccctgttgccatgacagaagaacaggaggaggagttggaaaagacagtcattcataatgataatgaagaacttatcaaggttgaagggaccaaaattgtcttggggaaacagctaattgagagtgcggatgaggttcgcagaaaatctctggttctcaagtttcctaaacagcagcttcctccaaagaagaaacggcgagttggaaccactgttcactgtgactatttgaatagacctcataagtccatccaccggcgccgcacagaccctatggtgacgctgtcgtccatcttggagtctatcatcaatgacatgagagatcttccaaatacataccctttccacactccagtcaatgcaaaggttgtaaaggactactacaaaatcatcactcggccaatggacctacaaacactccgcgaaaacgtgcgtaaacgcctctacccatctcgggaagagttcagagagcatctggagctaattgtgaaaaatagtgcaacctacaatgggccaaaacactcattgactcagatctctcaatccatgctggatctctgtgatgaaaaactcaaagagaaagaagacaaattagctcgcttagagaaagctatcaaccccttgctggatgatgatgaccaagtggcgttttctttcattctggacaacattgtcacccagaaaatgatggcagttccagattcttggccatttcatcacccagttaataagaaatttgttccagattattacaaagtgattgtcaatccaatggatttagagaccatacgtaagaacatctccaagcacaagtatcagagtcgggagagctttctggatgatgtaaaccttattctggccaacagtgttaagtataatgggtacatgtgcacaacgtgcaggacctgagagtcagtatactaagactgcccaggagattgtgaacgtctgttaccagacattgactgagtatgatgaacatttgactcaacttgagaaggatatttgtactgctaaagaagcagctttggaggaagcagaattagaaagcctggacccaatgaccccagggccctacacgcctcaggctaagcctcctgatttgtatgataccaacacatccctcagtatgtctcgagatgcctctgtatttcaagatgagagcaatatgtctgtcttggatattcccagtgccactccagaaaagcaggtaacacaggaaggtgaagatggagatggtgatcttgcagatgaagaggaaggaactgtacaacagcctcaagccagtgtcctgtatgaggatttgcttatgtctgaaggagaagatgatgaggaagatgctgggagtgatgaagaaggagacaatcctttctctgctatccagctgagtgaaagtggaagtgactctgatgtgggatctggtggaataagacccaaacaaccccgcatgcttcaggagaacacaaggatggacatggaaaatgaagaaagcatgatgtcctatgagggagacggtggggaggcttcccatggtttggaggatagcaacatcaggtaccaatgaacaagccattcagagatggatccacaaagatctctggagcaacgaccaggtcctgctctacccgattctcagctttggggatagaattcccagaaacatctgtgtccggagttggttccttccagtgggttcttggtcttgctgacttcaagaatgaagccgtggaccttcgcgcttcaggctgaagatagtgaaaatccgtgccagacttggattggaagaatgaaccaaggctttgagtctcttcgtctcatctccgttttgatacgtgtctccttagtttgtaagccaaggagaggactacagtgaggattgtggagggaagtggaccttattggtctttgagctctcacatctttaaagactgttggtgctgagagaaaaagtatcctcatctggcagaactcccatagggtgtgctccccttgctgttctgcttttgttttgcagaaagctgcctttttcaatgtactcattaggctttcattgttttttccttttttacctttttcatctttcactgttgatatcacaggtggccatatctttaccagtgcagctaccaaataagaaatcatcttttccacattcactagttagtgatggttgttgtactaccatgaaatcagtttcttctttacttttattcaggttacaagatttctggaaggttttaagatcaattttaattagtctttgtgactggttacttcatccaggggaccaatttctctctggaatattagtcccgcacccctggagagcctgtgcggctgcatctccctccggaggtggttctggagttggttccttttggtgggttcctggtctcgctgacttcaagaatgaagccacggaccttcacggtgagtgttacagctcttaaaggtggcacggactcaaagagtgagcagcagcaagattcattgtgaagacggaaagaacacagcttccacggtgtggaaagagacccgagtgggttgctac

SEQ ID NO: 745 - DNA, 6436 bp, Homo sapiens
  source 1..6436: mol_type = genomic DNA
atcactgctgccgccatcatgtcagacacggacagcgacgaagattccgctggaggcggcccattttctttagcgggtttccttttcggcaacatcaatggagccgggcagctggagggggaaagcgtcttggatgatgaatgtaagaagcacttggcaggcttgggggctttggggctgggcagcctgatcactgaactcacggcaaatgaagaattgaccgggactgacggtgccttggtaaatgatgaagggtgggttaggagtacagaagatgctgtggactattcagacatcaatgaggtggcagaagatgaaagccgaagataccagcagacgatggggagcttgcagcccctttgccactcagattatgatgaagatgactatgatgctgattgtgaagacattgattgcaagttgatgcctcctccacctccacccccgggaccaatgaagaaggataaggaccaggattctattactggtgtgtctgaaaatggagaaggcatcatcttgccctccatcattgccccttcctctttggcctcagagaaagtggacttcagtagttcctctgactcagaatctgagatgggacctcaggaagcaacacaggcagaatctgaagatggaaagctgacccttccattggctgggattatgcagcatgatgccaccaagctgttgccaagtgtcacagaactttttccagaatttcgacctggaaaggtgttacgttttctacgtctttttggaccagggaagaatgtcccatctgtttggcggagtgctcggagaaagaggaagaagaagcaccgtgagctgatacaggaagagcagatccaggaggtggagtgctcagtagaatcagaagtcagccagaagtctttgtggaactacgactacgctccaccaccacctccagagcagtgtctctctgatgatgaaatcacgatgatggctcctgtggagtccaaattttcccaatcaactggagatatagataaagtgacagataccaaaccaagagtggctgagtggcgttatgggcctgcccgactgtggtatgatatgctgggtgtccctgaagatggcagtgggtttgactatggcttcaaactgagaaagacagaacatgaacctgtgataaaatctagaatgatagaggaatttaggaaacttgaggaaaacaatggcactgatcttctggctgatgaaaacttcctgatggtgacacagctgcattgggaggatgatatcatctgggatggggaggatgtcaaacacaaagggacaaaacctcagcgtgcaagcctggcaggctggcttccttctagcatgactaggaatgcgatggcttacaatgttcagcaaggttttgcagccactcttgatgatgacaaaccttggtactccatttttcccattgacaatgaggatctggtatatggacgctgggaggacaatatcatttgggatgctcaggccatgccccggctgttggaacctcctgttttgacacttgatcccaatgatgagaacctcattttggaaattcctgatgagaaggaagaggccacctctaactccccctccaaggagagtaagaaggaatcatctctgaagaagagtcgaattctcttagggaaaacaggagtcatcaaggaggaaccacagcagaacatgtctcagccagaagtgaaagatccatggaatctctccaatgatgagtattattatcccaagcaacagggtcttcgaggcacctttggagggaatattatccagcattcaattcctgctgtggaattacggcagcccttctttcccacccacatggggcccatcaaactccggcagttccatcgcccacctctgaaaaagtactcatttggtgcactttctcagccaggtccccactcagtccaacctttgctaaagcacatcaaaaaaaaggccaagatgagagaacaagagaggcaagcttcaggtggtggagagatgttttttatgcgcacacctcaggacctcacaggcaaagatggtgatcttattcttgcagaatatagtgaggaaaatggacccttaatgatgcaggttggcatggcaaccaagataaagaactattataaacggaaacctggaaaagatcctggagcaccagattgtaaatatggggaaactgtttactgccatacatctcctttcctgggttctctccatcctggccaattgctgcaagcatttgagaacaacctttttcgtgctccaatttatcttcataagatgccagaaactgatttcttgatcattcggacaagacagggttactatattcgggaattagtggatatttttgtggttggccagcagtgtcccttgtttgaagttcctgggcctaactccaaaagggccaatacgcatattcgagactttctacaggtttttatttaccgccttttctggaaaagtaaagatcggccacggaggatacgaatggaagatataaaaaaagcctttccttcccattcagaaagcagcatccggaagaggctaaagctctgcgctgacttcaaacgcacagggatggactcaaactggtgggtgcttaagtctgattttcgtttaccaacggaagaagagatcagagctatggtgtcaccagagcagtgctgtgcttattatagcatgatagctgcagagcaacgactgaaggatgctggctatggtgagaaatccttttttgctccagaagaagaaaatgaggaagatttccagatgaagattgatgatgaagttcgcactgccccttggaacaccacaagggccttcattgctgccatgaagggcaagtgtctgctagaggtgactggggtggcagatcccacggggtgtggtgaaggattctcctatgtgaagattccaaacaaaccaacacagcagaaggatgataaagaaccgcagccagtgaagaagacagtgacaggaacagatgcagaccttcgtcgcctttccctgaaaaatgccaagcaacttctacgtaaatttggtgtgcctgaggaagagattaaaaagttgtcccgctgggaagtgattgatgtggtgcgcacaatgtcaacagaacaggctcgttctggagaggggcccatgagtaaatttgcccgtggatcaaggttttctgtggctgagcatcaagagcgttacaaagaggaatgtcagcgcatctttgacctacagaacaaggttctgtcatcaactgaagtcttatcaactgacacagacagcagctcagctgaagatagtgactttgaagaaatgggaaagaacattgagaacatgttgcagaacaagaaaaccagctctcagctttcacgtgaacgggaggaacaggagcggaaggaactacagcgaatgctactggcagcaggctcagcagcatccggaaacaatcacagagatgatgacacagcttccgtgactagccttaactcttctgccactggacgctgtctcaagatttatcgcacgtttcgagatgaagaggggaaagagtatgttcgctgtgagacagtccgaaaaccagctgtcattgatgcctatgtgcgcatacggactacaaaagatgaggaattcattcgaaaatttgccctttttgatgaacaacatcgggaagagatgcgaaaagaacggcggaggattcaagagcaactgaggcggcttaagaggaaccaggaaaaggagaagcttaagggtcctcctgagaagaagcccaagaaaatgaaggagcgtcctgacctaaaactgaaatgtggggcatgtggtgccattggacacatgaggactaacaaattctgccccctctattatcaaacaaatgcgccaccttccaaccctgttgccatgacagaagaacaggaggaggagttggaaaagacagtcattcataatgataatgaagaacttatcaaggttgaagggaccaaaattgtcttggggaaacagctaattgagagtgcggatgaggttcgcagaaaatctctggttctcaagtttcctaaacagcagcttcctccaaagaagaaacggcgagttggaaccactgttcactgtgactatttgaatagacctcataagtccatccaccggcgccgcacagaccctatggtgacgctgtcgtccatcttggagtctatcatcaatgacatgagagatcttccaaatacataccctttccacactccagtcaatgcaaaggttgtaaaggactactacaaaatcatcactcggccaatggacctacaaacactccgcgaaaacgtgcgtaaacgcctctacccatctcgggaagagttcagagagcatctggagctaattgtgaaaaatagtgcaacctacaatgggccaaaacactcattgactcagatctctcaatccatgctggatctctgtgatgaaaaactcaaagagaaagaagacaaattagctcgcttagagaaagctatcaaccccttgctggatgatgatgaccaagtggcgttttctttcattctggacaacattgtcacccagaaaatgatggcagttccagattcttggccatttcatcacccagttaataagaaatttgttccagattattacaaagtgattgtcaatccaatggatttagagaccatacgtaagaacatctccaagcacaagtatcagagtcgggagagctttctggatgatgtaaaccttattctggccaacagtgttaagtataatgggtacatgtgcacaacgtgcaggacctgagagtcagtatactaagactgcccaggagattgtgaacgtctgttaccagacattgactgagtatgatgaacatttgactcaacttgagaaggatatttgtactgctaaagaagcagctttggaggaagcagaattagaaagcctggacccaatgaccccagggccctacacgcctcagcctcctgatttgtatgataccaacacatccctcagtatgtctcgagatgcctctgtatttcaagatgagagcaatatgtctgtcttggatattcccagtgccactccagaaaagcaggtaacacaggaaggtgaagatggagatggtgatcttgcagatgaagaggaaggaactgtacaacagcctcaagccagtgtcctgtatgaggatttgcttatgtctgaaggagaagatgatgaggaagatgctgggagtgatgaagaaggagacaatcctttctctgctatccagctgagtgaaagtggaagtgactctgatgtgggatctggtggaataagacccaaacaaccccgcatgcttcaggagaacacaaggatggacatggaaaatgaagaaagcatgatgtcctatgagggagacggtggggaggcttcccatggtttggaggatagcaacatcaggtaccaatgaacaagccattcagagatggatccacaaagatctctggagcaacgaccaggtcctgctctacccgattctcagctttggggatagaattcccagaaacatctgtgtccggagttggttccttccagtgggttcttggtcttgctgacttcaagaatgaagccgtggaccttcgcgcttcaggctgaagatagtgaaaatccgtgccagacttggattggaagaatgaaccaaggctttgagtctcttcgtctcatctccgttttgatacgtgtctccttagtttgtaagccaaggagaggactacagtgaggattgtggagggaagtggaccttattggtctttgagctctcacatctttaaagactgttggtgctgagagaaaaagtatcctcatctggcagaactcccatagggtgtgctccccttgctgttctgcttttgttttgcagaaagctgcctttttcaatgtactcattaggctttcattgttttttccttttttacctttttcatctttcactgttgatatcacaggtggccatatctttaccagtgcagctaccaaataagaaatcatcttttccacattcactagttagtgatggttgttgtactaccatgaaatcagtttcttctttacttttattcaggttacaagatttctggaaggttttaagatcaattttaattagtctttgtgactggttacttcatccaggggaccaatttctctctggaatattagtcccgcacccctggagagcctgtgcggctgcatctccctccggaggtggttctggagttggttccttttggtgggttcctggtctcgctgacttcaagaatgaagccacggaccttcacggtgagtgttacagctcttaaaggtggcacggactcaaagagtgagcagcagcaagattcattgtgaagacggaaagaacacagcttccacggtgtggaaagagacccgagtgggttgctac

SEQ ID NO: 746 - DNA, 6522 bp, Homo sapiens
  source 1..6522: mol_type = genomic DNA
atcactgctgccgccatcatgtcagacacggacagcgacgaagattccgctggaggcggcccattttctttagcgggtttccttttcggcaacatcaatggagccgggcagctggagggggaaagcgtcttggatgatgaatgtaagaagcacttggcaggcttgggggctttggggctgggcagcctgatcactgaactcacggcaaatgaagaattgaccgggactgacggtgccttggtaaatgatgaagggtgggttaggagtacagaagatgctgtggactattcagacatcaatgaggtggcagaagatgaaagccgaagataccagcagacgatggggagcttgcagcccctttgccactcagattatgatgaagatgactatgatgctgattgtgaagacattgattgcaagttgatgcctcctccacctccacccccgggaccaatgaagaaggataaggaccaggattctattactggtgtgtctgaaaatggagaaggcatcatcttgccctccatcattgccccttcctctttggcctcagagaaagtggacttcagtagttcctctgactcagaatctgagatgggacctcaggaagcaacacaggcagaatctgaagatggaaagctgacccttccattggctgggattatgcagcatgatgccaccaagctgttgccaagtgtcacagaactttttccagaatttcgacctggaaaggtgttacgttttctacgtctttttggaccagggaagaatgtcccatctgtttggcggagtgctcggagaaagaggaagaagaagcaccgtgagctgatacaggaagagcagatccaggaggtggagtgctcagtagaatcagaagtcagccagaagtctttgtggaactacgactacgctccaccaccacctccagagcagtgtctctctgatgatgaaatcacgatgatggctcctgtggagtccaaattttcccaatcaactggagatatagataaagtgacagataccaaaccaagagtggctgagtggcgttatgggcctgcccgactgtggtatgatatgctgggtgtccctgaagatggcagtgggtttgactatggcttcaaactgagaaagacagaacatgaacctgtgataaaatctagaatgatagaggaatttaggaaacttgaggaaaacaatggcactgatcttctggctgatgaaaacttcctgatggtgacacagctgcattgggaggatgatatcatctgggatggggaggatgtcaaacacaaagggacaaaacctcagcgtgcaagcctggcaggctggcttccttctagcatgactaggaatgcgatggcttacaatgttcagcaaggttttgcagccactcttgatgatgacaaaccttggtactccatttttcccattgacaatgaggatctggtatatggacgctgggaggacaatatcatttgggatgctcaggccatgccccggctgttggaacctcctgttttgacacttgatcccaatgatgagaacctcattttggaaattcctgatgagaaggaagaggccacctctaactccccctccaaggagagtaagaaggaatcatctctgaagaagagtcgaattctcttagggaaaacaggagtcatcaaggaggaaccacagcagaacatgtctcagccagaagtgaaagatccatggaatctctccaatgatgagtattattatcccaagcaacagggtcttcgaggcacctttggagggaatattatccagcattcaattcctgctgtggaattacggcagcccttctttcccacccacatggggcccatcaaactccggcagttccatcgcccacctctgaaaaagtactcatttggtgcactttctcagccaggtccccactcagtccaacctttgctaaagcacatcaaaaaaaaggccaagatgagagaacaagagaggcaagcttcaggtggtggagagatgttttttatgcgcacacctcaggacctcacaggcaaagatggtgatcttattcttgcagaatatagtgaggaaaatggacccttaatgatgcaggttggcatggcaaccaagataaagaactattataaacggaaacctggaaaagatcctggagcaccagattgtaaatatggggaaactgtttactgccatacatctcctttcctgggttctctccatcctggccaattgctgcaagcatttgagaacaacctttttcgtgctccaatttatcttcataagatgccagaaactgatttcttgatcattcggacaagacagggttactatattcgggaattagtggatatttttgtggttggccagcagtgtcccttgtttgaagttcctgggcctaactccaaaagggccaatacgcatattcgagactttctacaggtttttatttaccgccttttctggaaaagtaaagatcggccacggaggatacgaatggaagatataaaaaaagcctttccttcccattcagaaagcagcatccggaagaggctaaagctctgcgctgacttcaaacgcacagggatggactcaaactggtgggtgcttaagtctgattttcgtttaccaacggaagaagagatcagagctatggtgtcaccagagcagtgctgtgcttattatagcatgatagctgcagagcaacgactgaaggatgctggctatggtgagaaatccttttttgctccagaagaagaaaatgaggaagatttccagatgaagattgatgatgaagttcgcactgccccttggaacaccacaagggccttcattgctgccatgaagggcaagtgtctgctagaggtgactggggtggcagatcccacggggtgtggtgaaggattctcctatgtgaagattccaaacaaaccaacacagcagaaggatgataaagaaccgcagccagtgaagaagacagtgacaggaacagatgcagaccttcgtcgcctttccctgaaaaatgccaagcaacttctacgtaaatttggtgtgcctgaggaagagattaaaaagttgtcccgctgggaagtgattgatgtggtgcgcacaatgtcaacagaacaggctcgttctggagaggggcccatgagtaaatttgcccgtggatcaaggttttctgtggctgagcatcaagagcgttacaaagaggaatgtcagcgcatctttgacctacagaacaaggttctgtcatcaactgaagtcttatcaactgacacagacagcagctcagctgaagatagtgactttgaagaaatgggaaagaacattgagaacatgttgcagaacaagaaaaccagctctcagctttcacgtgaacgggaggaacaggagcggaaggaactacagcgaatgctactggcagcaggctcagcagcatccggaaacaatcacagagatgatgacacagcttccgtgactagccttaactcttctgccactggacgctgtctcaagatttatcgcacgtttcgagatgaagaggggaaagagtatgttcgctgtgagacagtccgaaaaccagctgtcattgatgcctatgtgcgcatacggactacaaaagatgaggaattcattcgaaaatttgccctttttgatgaacaacatcgggaagagatgcgaaaagaacggcggaggattcaagagcaactgaggcggcttaagaggaaccaggaaaaggagaagcttaagggtcctcctgagaagaagcccaagaaaatgaaggagcgtcctgacctaaaactgaaatgtggggcatgtggtgccattggacacatgaggactaacaaattctgccccctctattatcaaacaaatgcgccaccttccaaccctgttgccatgacagaagaacaggaggaggagttggaaaagacagtcattcataatgataatgaagaacttatcaaggttgaagggaccaaaattgtcttggggaaacagctaattgagagtgcggatgaggttcgcagaaaatctctggttctcaagtttcctaaacagcagcttcctccaaagaagaaacggcgagttggaaccactgttcactgtgactatttgaatagacctcataagtccatccaccggcgccgcacagaccctatggtgacgctgtcgtccatcttggagtctatcatcaatgacatgagagatcttccaaatacataccctttccacactccagtcaatgcaaaggttgtaaaggactactacaaaatcatcactcggccaatggacctacaaacactccgcgaaaacgtgcgtaaacgcctctacccatctcgggaagagttcagagagcatctggagctaattgtgaaaaatagtgcaacctacaatgggccaaaacactcattgactcagatctctcaatccatgctggatctctgtgatgaaaaactcaaagagaaagaagacaaattagctcgcttagagaaagctatcaaccccttgctggatgatgatgaccaagtggcgttttctttcattctggacaacattgtcacccagaaaatgatggcagttccagattcttggccatttcatcacccagttaataagaaatttgttccagattattacaaagtgattgtcaatccaatggatttagagaccatacgtaagaacatctccaagcacaagtatcagagtcgggagagctttctggatgatgtaaaccttattctggccaacagtgttaagtataatggacctgagagtcagtatactaagactgcccaggagattgtgaacgtctgttaccagacattgactgagtatgatgaacatttgactcaacttgagaaggatatttgtactgctaaagaagcagctttggaggaagcagaattagaaagcctggacccaatgaccccagggccctacacgcctcaggctaagcctcctgatttgtatgataccaacacatccctcagtatgtctcgagatgcctctgtatttcaagatgagagcaatatgtctgtcttggatattcccagtgccactccagaaaagcaggtaacacagatgcgccagggccgaggtaggctgggcgaggaagactctgatgtagatattgaagggtatgatgatgaggaggaggatgggaaacctaagactccagccccagaaggtgaagatggagatggtgatcttgcagatgaagaggaaggaactgtacaacagcctcaagccagtgtcctgtatgaggatttgcttatgtctgaaggagaagatgatgaggaagatgctgggagtgatgaagaaggagacaatcctttctctgctatccagctgagtgaaagtggaagtgactctgatgtgggatctggtggaataagacccaaacaaccccgcatgcttcaggagaacacaaggatggacatggaaaatgaagaaagcatgatgtcctatgagggagacggtggggaggcttcccatggtttggaggatagcaacatcaggtaccaatgaacaagccattcagagatggatccacaaagatctctggagcaacgaccaggtcctgctctacccgattctcagctttggggatagaattcccagaaacatctgtgtccggagttggttccttccagtgggttcttggtcttgctgacttcaagaatgaagccgtggaccttcgcgcttcaggctgaagatagtgaaaatccgtgccagacttggattggaagaatgaaccaaggctttgagtctcttcgtctcatctccgttttgatacgtgtctccttagtttgtaagccaaggagaggactacagtgaggattgtggagggaagtggaccttattggtctttgagctctcacatctttaaagactgttggtgctgagagaaaaagtatcctcatctggcagaactcccatagggtgtgctccccttgctgttctgcttttgttttgcagaaagctgcctttttcaatgtactcattaggctttcattgttttttccttttttacctttttcatctttcactgttgatatcacaggtggccatatctttaccagtgcagctaccaaataagaaatcatcttttccacattcactagttagtgatggttgttgtactaccatgaaatcagtttcttctttacttttattcaggttacaagatttctggaaggttttaagatcaattttaattagtctttgtgactggttacttcatccaggggaccaatttctctctggaatattagtcccgcacccctggagagcctgtgcggctgcatctccctccggaggtggttctggagttggttccttttggtgggttcctggtctcgctgacttcaagaatgaagccacggaccttcacggtgagtgttacagctcttaaaggtggcacggactcaaagagtgagcagcagcaagattcattgtgaagacggaaagaacacagcttccacggtgtggaaagagacccgagtgggttgctac

SEQ ID NO: 747 - DNA, 6393 bp, Homo sapiens
  source 1..6393: mol_type = genomic DNA
atcactgctgccgccatcatgtcagacacggacagcgacgaagattccgctggaggcggcccattttctttagcgggtttccttttcggcaacatcaatggagccgggcagctggagggggaaagcgtcttggatgatgaatgtaagaagcacttggcaggcttgggggctttggggctgggcagcctgatcactgaactcacggcaaatgaagaattgaccgggactgacggtgccttggtaaatgatgaagggtgggttaggagtacagaagatgctgtggactattcagacatcaatgaggtggcagaagatgaaagccgaagataccagcagacgatggggagcttgcagcccctttgccactcagattatgatgaagatgactatgatgctgattgtgaagacattgattgcaagttgatgcctcctccacctccacccccgggaccaatgaagaaggataaggaccaggattctattactggtgtgtctgaaaatggagaaggcatcatcttgccctccatcattgccccttcctctttggcctcagagaaagtggacttcagtagttcctctgactcagaatctgagatgggacctcaggaagcaacacaggcagaatctgaagatggaaagctgacccttccattggctgggattatgcagcatgatgccaccaagctgttgccaagtgtcacagaactttttccagaatttcgacctggaaaggtgttacgttttctacgtctttttggaccagggaagaatgtcccatctgtttggcggagtgctcggagaaagaggaagaagaagcaccgtgagctgatacaggaagagcagatccaggaggtggagtgctcagtagaatcagaagtcagccagaagtctttgtggaactacgactacgctccaccaccacctccagagcagtgtctctctgatgatgaaatcacgatgatggctcctgtggagtccaaattttcccaatcaactggagatatagataaagtgacagataccaaaccaagagtggctgagtggcgttatgggcctgcccgactgtggtatgatatgctgggtgtccctgaagatggcagtgggtttgactatggcttcaaactgagaaagacagaacatgaacctgtgataaaatctagaatgatagaggaatttaggaaacttgaggaaaacaatggcactgatcttctggctgatgaaaacttcctgatggtgacacagctgcattgggaggatgatatcatctgggatggggaggatgtcaaacacaaagggacaaaacctcagcgtgcaagcctggcaggctggcttccttctagcatgactaggaatgcgatggcttacaatgttcagcaaggttttgcagccactcttgatgatgacaaaccttggtactccatttttcccattgacaatgaggatctggtatatggacgctgggaggacaatatcatttgggatgctcaggccatgccccggctgttggaacctcctgttttgacacttgatcccaatgatgagaacctcattttggaaattcctgatgagaaggaagaggccacctctaactccccctccaaggagagtaagaaggaatcatctctgaagaagagtcgaattctcttagggaaaacaggagtcatcaaggaggaaccacagcagaacatgtctcagccagaagtgaaagatccatggaatctctccaatgatgagtattattatcccaagcaacagggtcttcgaggcacctttggagggaatattatccagcattcaattcctgctgtggaattacggcagcccttctttcccacccacatggggcccatcaaactccggcagttccatcgcccacctctgaaaaagtactcatttggtgcactttctcagccaggtccccactcagtccaacctttgctaaagcacatcaaaaaaaaggccaagatgagagaacaagagaggcaagcttcaggtggtggagagatgttttttatgcgcacacctcaggacctcacaggcaaagatggtgatcttattcttgcagaatatagtgaggaaaatggacccttaatgatgcaggttggcatggcaaccaagataaagaactattataaacggaaacctggaaaagatcctggagcaccagattgtaaatatggggaaactgtttactgccatacatctcctttcctgggttctctccatcctggccaattgctgcaagcatttgagaacaacctttttcgtgctccaatttatcttcataagatgccagaaactgatttcttgatcattcggacaagacagggttactatattcgggaattagtggatatttttgtggttggccagcagtgtcccttgtttgaagttcctgggcctaactccaaaagggccaatacgcatattcgagactttctacaggtttttatttaccgccttttctggaaaagtaaagatcggccacggaggatacgaatggaagatataaaaaaagcctttccttcccattcagaaagcagcatccggaagaggctaaagctctgcgctgacttcaaacgcacagggatggactcaaactggtgggtgcttaagtctgattttcgtttaccaacggaagaagagatcagagctatggtgtcaccagagcagtgctgtgcttattatagcatgatagctgcagagcaacgactgaaggatgctggctatggtgagaaatccttttttgctccagaagaagaaaatgaggaagatttccagatgaagattgatgatgaagttcgcactgccccttggaacaccacaagggccttcattgctgccatgaagggcaagtgtctgctagaggtgactggggtggcagatcccacggggtgtggtgaaggattctcctatgtgaagattccaaacaaaccaacacagcagaaggatgataaagaaccgcagccagtgaagaagacagtgacaggaacagatgcagaccttcgtcgcctttccctgaaaaatgccaagcaacttctacgtaaatttggtgtgcctgaggaagagattaaaaagttgtcccgctgggaagtgattgatgtggtgcgcacaatgtcaacagaacaggctcgttctggagaggggcccatgagtaaatttgcccgtggatcaaggttttctgtggctgagcatcaagagcgttacaaagaggaatgtcagcgcatctttgacctacagaacaaggttctgtcatcaactgaagtcttatcaactgacacagacagcagctcagctgaagatagtgactttgaagaaatgggaaagaacattgagaacatgttgcagaacaagaaaaccagctctcagctttcacgtgaacgggaggaacaggagcggaaggaactacagcgaatgctactggcagcaggctcagcagcatccggaaacaatcacagagatgatgacacagcttccgtgactagccttaactcttctgccactggacgctgtctcaagatttatcgcacgtttcgagatgaagaggggaaagagtatgttcgctgtgagacagtccgaaaaccagctgtcattgatgcctatgtgcgcatacggactacaaaagatgaggaattcattcgaaaatttgccctttttgatgaacaacatcgggaagagatgcgaaaagaacggcggaggattcaagagcaactgaggcggcttaagaggaaccaggaaaaggagaagcttaagggtcctcctgagaagaagcccaagaaaatgaaggagcgtcctgacctaaaactgaaatgtggggcatgtggtgccattggacacatgaggactaacaaattctgccccctctattatcaaacaaatgcgccaccttccaaccctgttgccatgacagaagaacaggaggaggagttggaaaagacagtcattcataatgataatgaagaacttatcaaggttgaagggaccaaaattgtcttggggaaacagctaattgagagtgcggatgaggttcgcagaaaatctctggttctcaagtttcctaaacagcagcttcctccaaagaagaaacggcgagttggaaccactgttcactgtgactatttgaatagacctcataagtccatccaccggcgccgcacagaccctatggtgacgctgtcgtccatcttggagtctatcatcaatgacatgagagatcttccaaatacataccctttccacactccagtcaatgcaaaggttgtaaaggactactacaaaatcatcactcggccaatggacctacaaacactccgcgaaaacgtgcgtaaacgcctctacccatctcgggaagagttcagagagcatctggagctaattgtgaaaaatagtgcaacctacaatgggccaaaacactcattgactcagatctctcaatccatgctggatctctgtgatgaaaaactcaaagagaaagaagacaaattagctcgcttagagaaagctatcaaccccttgctggatgatgatgaccaagtggcgttttctttcattctggacaacattgtcacccagaaaatgatggcagttccagatattattacaaagtgattgtcaatccaatggatttagagaccatacgtaagaacatctccaagcacaagtatcagagtcgggagagctttctggatgatgtaaaccttattctggccaacagtgttaagtataatgggtacatgtgcacaacgtgcaggacctgagagtcagtatactaagactgcccaggagattgtgaacgtctgttaccagacattgactgagtatgatgaacatttgactcaacttgagaaggatatttgtactgctaaagaagcagctttggaggaagcagaattagaaagcctggacccaatgaccccagggccctacacgcctcagcctcctgatttgtatgataccaacacatccctcagtatgtctcgagatgcctctgtatttcaagatgagagcaatatgtctgtcttggatattcccagtgccactccagaaaagcaggtaacacaggaaggtgaagatggagatggtgatcttgcagatgaagaggaaggaactgtacaacagcctcaagccagtgtcctgtatgaggatttgcttatgtctgaaggagaagatgatgaggaagatgctgggagtgatgaagaaggagacaatcctttctctgctatccagctgagtgaaagtggaagtgactctgatgtgggatctggtggaataagacccaaacaaccccgcatgcttcaggagaacacaaggatggacatggaaaatgaagaaagcatgatgtcctatgagggagacggtggggaggcttcccatggtttggaggatagcaacatcaggtaccaatgaacaagccattcagagatggatccacaaagatctctggagcaacgaccaggtcctgctctacccgattctcagctttggggatagaattcccagaaacatctgtgtccggagttggttccttccagtgggttcttggtcttgctgacttcaagaatgaagccgtggaccttcgcgcttcaggctgaagatagtgaaaatccgtgccagacttggattggaagaatgaaccaaggctttgagtctcttcgtctcatctccgttttgatacgtgtctccttagtttgtaagccaaggagaggactacagtgaggattgtggagggaagtggaccttattggtctttgagctctcacatctttaaagactgttggtgctgagagaaaaagtatcctcatctggcagaactcccatagggtgtgctccccttgctgttctgcttttgttttgcagaaagctgcctttttcaatgtactcattaggctttcattgttttttccttttttacctttttcatctttcactgttgatatcacaggtggccatatctttaccagtgcagctaccaaataagaaatcatcttttccacattcactagttagtgatggttgttgtactaccatgaaatcagtttcttctttacttttattcaggttacaagatttctggaaggttttaagatcaattttaattagtctttgtgactggttacttcatccaggggaccaatttctctctggaatattagtcccgcacccctggagagcctgtgcggctgcatctccctccggaggtggttctggagttggttccttttggtgggttcctggtctcgctgacttcaagaatgaagccacggaccttcacggtgagtgttacagctcttaaaggtggcacggactcaaagagtgagcagcagcaagattcattgtgaagacggaaagaacacagcttccacggtgtggaaagagacccgagtgggttgctac

SEQ ID NO: 748 - DNA, 6445 bp, Homo sapiens
  source 1..6445: mol_type = genomic DNA
atcactgctgccgccatcatgtcagacacggacagcgacgaagattccgctggaggcggcccattttctttagcgggtttccttttcggcaacatcaatggagccgggcagctggagggggaaagcgtcttggatgatgaatgtaagaagcacttggcaggcttgggggctttggggctgggcagcctgatcactgaactcacggcaaatgaagaattgaccgggactgacggtgccttggtaaatgatgaagggtgggttaggagtacagaagatgctgtggactattcagacatcaatgaggtggcagaagatgaaagccgaagataccagcagacgatggggagcttgcagcccctttgccactcagattatgatgaagatgactatgatgctgattgtgaagacattgattgcaagttgatgcctcctccacctccacccccgggaccaatgaagaaggataaggaccaggattctattactggtgtgtctgaaaatggagaaggcatcatcttgccctccatcattgccccttcctctttggcctcagagaaagtggacttcagtagttcctctgactcagaatctgagatgggacctcaggaagcaacacaggcagaatctgaagatggaaagctgacccttccattggctgggattatgcagcatgatgccaccaagctgttgccaagtgtcacagaactttttccagaatttcgacctggaaaggtgttacgttttctacgtctttttggaccagggaagaatgtcccatctgtttggcggagtgctcggagaaagaggaagaagaagcaccgtgagctgatacaggaagagcagatccaggaggtggagtgctcagtagaatcagaagtcagccagaagtctttgtggaactacgactacgctccaccaccacctccagagcagtgtctctctgatgatgaaatcacgatgatggctcctgtggagtccaaattttcccaatcaactggagatatagataaagtgacagataccaaaccaagagtggctgagtggcgttatgggcctgcccgactgtggtatgatatgctgggtgtccctgaagatggcagtgggtttgactatggcttcaaactgagaaagacagaacatgaacctgtgataaaatctagaatgatagaggaatttaggaaacttgaggaaaacaatggcactgatcttctggctgatgaaaacttcctgatggtgacacagctgcattgggaggatgatatcatctgggatggggaggatgtcaaacacaaagggacaaaacctcagcgtgcaagcctggcaggctggcttccttctagcatgactaggaatgcgatggcttacaatgttcagcaaggttttgcagccactcttgatgatgacaaaccttggtactccatttttcccattgacaatgaggatctggtatatggacgctgggaggacaatatcatttgggatgctcaggccatgccccggctgttggaacctcctgttttgacacttgatcccaatgatgagaacctcattttggaaattcctgatgagaaggaagaggccacctctaactccccctccaaggagagtaagaaggaatcatctctgaagaagagtcgaattctcttagggaaaacaggagtcatcaaggaggaaccacagcagaacatgtctcagccagaagtgaaagatccatggaatctctccaatgatgagtattattatcccaagcaacagggtcttcgaggcacctttggagggaatattatccagcattcaattcctgctgtggaattacggcagcccttctttcccacccacatggggcccatcaaactccggcagttccatcgcccacctctgaaaaagtactcatttggtgcactttctcagccaggtccccactcagtccaacctttgctaaagcacatcaaaaaaaaggccaagatgagagaacaagagaggcaagcttcaggtggtggagagatgttttttatgcgcacacctcaggacctcacaggcaaagatggtgatcttattcttgcagaatatagtgaggaaaatggacccttaatgatgcaggttggcatggcaaccaagataaagaactattataaacggaaacctggaaaagatcctggagcaccagattgtaaatatggggaaactgtttactgccatacatctcctttcctgggttctctccatcctggccaattgctgcaagcatttgagaacaacctttttcgtgctccaatttatcttcataagatgccagaaactgatttcttgatcattcggacaagacagggttactatattcgggaattagtggatatttttgtggttggccagcagtgtcccttgtttgaagttcctgggcctaactccaaaagggccaatacgcatattcgagactttctacaggtttttatttaccgccttttctggaaaagtaaagatcggccacggaggatacgaatggaagatataaaaaaagcctttccttcccattcagaaagcagcatccggaagaggctaaagctctgcgctgacttcaaacgcacagggatggactcaaactggtgggtgcttaagtctgattttcgtttaccaacggaagaagagatcagagctatggtgtcaccagagcagtgctgtgcttattatagcatgatagctgcagagcaacgactgaaggatgctggctatggtgagaaatccttttttgctccagaagaagaaaatgaggaagatttccagatgaagattgatgatgaagttcgcactgccccttggaacaccacaagggccttcattgctgccatgaagggcaagtgtctgctagaggtgactggggtggcagatcccacggggtgtggtgaaggattctcctatgtgaagattccaaacaaaccaacacagcagaaggatgataaagaaccgcagccagtgaagaagacagtgacaggaacagatgcagaccttcgtcgcctttccctgaaaaatgccaagcaacttctacgtaaatttggtgtgcctgaggaagagattaaaaagttgtcccgctgggaagtgattgatgtggtgcgcacaatgtcaacagaacaggctcgttctggagaggggcccatgagtaaatttgcccgtggatcaaggttttctgtggctgagcatcaagagcgttacaaagaggaatgtcagcgcatctttgacctacagaacaaggttctgtcatcaactgaagtcttatcaactgacacagacagcagctcagctgaagatagtgactttgaagaaatgggaaagaacattgagaacatgttgcagaacaagaaaaccagctctcagctttcacgtgaacgggaggaacaggagcggaaggaactacagcgaatgctactggcagcaggctcagcagcatccggaaacaatcacagagatgatgacacagcttccgtgactagccttaactcttctgccactggacgctgtctcaagatttatcgcacgtttcgagatgaagaggggaaagagtatgttcgctgtgagacagtccgaaaaccagctgtcattgatgcctatgtgcgcatacggactacaaaagatgaggaattcattcgaaaatttgccctttttgatgaacaacatcgggaagagatgcgaaaagaacggcggaggattcaagagcaactgaggcggcttaagaggaaccaggaaaaggagaagcttaagggtcctcctgagaagaagcccaagaaaatgaaggagcgtcctgacctaaaactgaaatgtggggcatgtggtgccattggacacatgaggactaacaaattctgccccctctattatcaaacaaatgcgccaccttccaaccctgttgccatgacagaagaacaggaggaggagttggaaaagacagtcattcataatgataatgaagaacttatcaaggttgaagggaccaaaattgtcttggggaaacagctaattgagagtgcggatgaggttcgcagaaaatctctggttctcaagtttcctaaacagcagcttcctccaaagaagaaacggcgagttggaaccactgttcactgtgactatttgaatagacctcataagtccatccaccggcgccgcacagaccctatggtgacgctgtcgtccatcttggagtctatcatcaatgacatgagagatcttccaaatacataccctttccacactccagtcaatgcaaaggttgtaaaggactactacaaaatcatcactcggccaatggacctacaaacactccgcgaaaacgtgcgtaaacgcctctacccatctcgggaagagttcagagagcatctggagctaattgtgaaaaatagtgcaacctacaatgggccaaaacactcattgactcagatctctcaatccatgctggatctctgtgatgaaaaactcaaagagaaagaagacaaattagctcgcttagagaaagctatcaaccccttgctggatgatgatgaccaagtggcgttttctttcattctggacaacattgtcacccagaaaatgatggcagttccagatgtaagctgtctctgtgccaaatacttcttggccatttcatcacccagttaataagaaatttgttccagattattacaaagtgattgtcaatccaatggatttagagaccatacgtaagaacatctccaagcacaagtatcagagtcgggagagctttctggatgatgtaaaccttattctggccaacagtgttaagtataatggacctgagagtcagtatactaagactgcccaggagattgtgaacgtctgttaccagacattgactgagtatgatgaacatttgactcaacttgagaaggatatttgtactgctaaagaagcagctttggaggaagcagaattagaaagcctggacccaatgaccccagggccctacacgcctcaggctaagcctcctgatttgtatgataccaacacatccctcagtatgtctcgagatgcctctgtatttcaagatgagagcaatatgtctgtcttggatattcccagtgccactccagaaaagcaggtaacacaggaaggtgaagatggagatggtgatcttgcagatgaagaggaaggaactgtacaacagcctcaagccagtgtcctgtatgaggatttgcttatgtctgaaggagaagatgatgaggaagatgctgggagtgatgaagaaggagacaatcctttctctgctatccagctgagtgaaagtggaagtgactctgatgtgggatctggtggaataagacccaaacaaccccgcatgcttcaggagaacacaaggatggacatggaaaatgaagaaagcatgatgtcctatgagggagacggtggggaggcttcccatggtttggaggatagcaacatcaggtaccaatgaacaagccattcagagatggatccacaaagatctctggagcaacgaccaggtcctgctctacccgattctcagctttggggatagaattcccagaaacatctgtgtccggagttggttccttccagtgggttcttggtcttgctgacttcaagaatgaagccgtggaccttcgcgcttcaggctgaagatagtgaaaatccgtgccagacttggattggaagaatgaaccaaggctttgagtctcttcgtctcatctccgttttgatacgtgtctccttagtttgtaagccaaggagaggactacagtgaggattgtggagggaagtggaccttattggtctttgagctctcacatctttaaagactgttggtgctgagagaaaaagtatcctcatctggcagaactcccatagggtgtgctccccttgctgttctgcttttgttttgcagaaagctgcctttttcaatgtactcattaggctttcattgttttttccttttttacctttttcatctttcactgttgatatcacaggtggccatatctttaccagtgcagctaccaaataagaaatcatcttttccacattcactagttagtgatggttgttgtactaccatgaaatcagtttcttctttacttttattcaggttacaagatttctggaaggttttaagatcaattttaattagtctttgtgactggttacttcatccaggggaccaatttctctctggaatattagtcccgcacccctggagagcctgtgcggctgcatctccctccggaggtggttctggagttggttccttttggtgggttcctggtctcgctgacttcaagaatgaagccacggaccttcacggtgagtgttacagctcttaaaggtggcacggactcaaagagtgagcagcagcaagattcattgtgaagacggaaagaacacagcttccacggtgtggaaagagacccgagtgggttgctac

SEQ ID NO: 749 - DNA, 1545 bp, Homo sapiens
  source 1..1545: mol_type = genomic DNA
gctgttggacttctccgcctgcgcgtccgcctcgcccctgggcctgtccgggccgaccttgccgccgtcgcgctgcgtcgccctgctcctgctgcgggtggaacggctccacgtggctgtctacctgccgcgtgaggctctccaccagctccaccctctggctcttgatctggatcttctgatcgcccggctcctagctgcggatcagggcccgctgggcgcagggtggcacccgcggcttctgcgcgcagtccgtgtcgcggcggaccttctcatagcacttgtccaggtccttcagggtctcctccaggaaagtctccgtgccgcaagcccggctaactcacgcctccccagccatgtgcggccgcaccctccggtctgcagaggtgtggcatgtgacggtctgcgagccggtgtcgcgggacgccggggcggggcgggccgcccaagctgcagcccaggcccccagcccccagccctagcctcggcccggcctccggcattgctccgcggctggaagcgcaatgcccttctcactgtgctccactgtaccaatgaacaagccattcagagatggatccacaaagatctctggagcaacgaccaggtcctgctctacccgattctcagctttggggatagaattcccagaaacatctgtgtccggagttggttccttccagtgggttcttggtcttgctgacttcaagaatgaagccgtggaccttcgcgcttcaggctgaagatagtgaaaatccgtgccagacttggattggaagaatgaaccaaggctttgagtctcttcgtctcatctccgttttgatacgtgtctccttagtttgtaagccaaggagaggactacagtgaggattgtggagggaagtggaccttattggtctttgagctctcacatctttaaagactgttggtgctgagagaaaaagtatcctcatctggcagaactcccatagggtgtgctccccttgctgttctgcttttgttttgcagaaagctgcctttttcaatgtactcattaggctttcattgttttttccttttttacctttttcatctttcactgttgatatcacaggtggccatatctttaccagtgcagctaccaaataagaaatcatcttttccacattcactagttagtgatggttgttgtactaccatgaaatcagtttcttctttacttttattcaggttacaagatttctggaaggttttaagatcaattttaattagtctttgtgactggttacttcatccaggggaccaatttctctctggaatattagtcccgcacccctggagagcctgtgcggctgcatctccctccggaggtggttctggagttggttccttttggtgggttcctggtctcgctgacttcaagaatgaagccacggaccttcacggtgagtgttacagctcttaaaggtggcacggactcaaagagtgagcagcagcaagattcattgtgaagacggaaagaacacagcttccacggtgtggaaagagacccgagtgggttgctac

SEQ ID NO: 750 - DNA, 3073 bp, Homo sapiens
  source 1..3073: mol_type = genomic DNA
atcactgctgccgccatcatgtcagacacggacagcgacgaagattccgctggaggcggcccattttctttagcgggtttccttttcggcaacatcaatggagccgggcagctggagggggaaagcgtcttggatgatgaatgtaagaagcacttggcaggcttgggggctttggggctgggcagcctgatcactgaactcacggcaaatgaagaattgaccgggactgacggtgccttggtaaatgatgaagggtgggttaggagtacagaagatgctgtggactattcagacatcaatgaggtggcagaagatgaaagccgaagataccagcagacgatggggagcttgcagcccctttgccactcagattatgatgaagatgactatgatgctgattgtgaagacattgattgcaagttgatgcctcctccacctccacccccgggaccaatgaagaaggataaggaccaggattctattactggtgtgtctgaaaatggagaaggcatcatcttgccctccatcattgccccttcctctttggcctcagagaaagtggacttcagtagttcctctgactcagaatctgagatgggacctcaggaagcaacacaggcagaatctgaagatggaaagctgacccttccattggctgggattatgcagcatgatgccaccaagctgttgccaagtgtcacagaactttttccagaatttcgacctggaaaggtgttacgttttctacgtctttttggaccagggaagaatgtcccatctgtttggcggagtgctcggagaaagaggaagaagaagcaccgtgagctgatacaggaagagcagatccaggaggtggagtgctcagtagaatcagaagtcagccagaagtctttgtggaactacgactacgctccaccaccacctccagagcagtgtctctctgatgatgaaatcacgatgatggctcctgtggagtccaaattttcccaatcaactggagatatagataaagtgacagataccaaaccaagagtggctgagtggcgttatgggcctgcccgactgtggtatgatatgctgggtgtccctgaagatggcagtgggtttgactatggcttcaaactgagaaagacagaacatgaacctgtgataaaatctagaatgatagaggaatttaggaaacttgaggaaaacaatggcactgatcttctggctgatgaaaacttcctgatggtgacacagctgcattgggaggatgatatcatctgggatggggaggatgtcaaacacaaagggacaaaacctcagcgtgcaagcctggcaggctggcttccttctagcatgactaggaatgcgatggcttacaatgttcagcaaggttttgcagccactcttgatgatgacaaaccttggtactccatttttcccattgacaatgaggatctggtatatggacgctgggaggacaatatcatttgggatgctcaggccatgccccggctgttggaacctcctgttttgacacttgatcccaatgatgagaacctcattttggaaattcctgatgagaaggaagaggccacctctaactccccctccaaggagagtaagaaggaatcatctctgaagaagagtcgaattctcttagggaaaacaggagtcatcaaggaggaaccacagcagaacatgtctcagccagaagtgaaagatccatggaatctctccaatgatgagtattattatcccaagcaacagggtcttcgaggcacctttggagggaatattatccagcattcaattcctgctgtggaattacggcagcccttctttcccacccacatggggcccatcaaactccggcagttccatcgcccacctctgaaaaagtactcatttggtgcactttctcagccaggtccccactcagtccaacctttgctaaagcacatcaaaaaaaaggccaagatgagagaacaagagaggcaagcttcaggtggtggagagatgttttttatgcgcacacctcaggacctcacaggcaaagatggtgatcttattcttgcagaatatagtgaggaaaatggacccttaatgatgcaggttggcatggcaaccaagataaagaactattataaacggaaacctggaaaagatcctggagcaccagattgtaaatatggggaaactgtttactgccatacatctcctttcctgggttctctccatcctggccaattgctgcaagcatttgagaacaacctttttcgtgctccaatttatcttcataagatgccagaaactgatttcttgatcattcggacaagacagggttactatattcgggaattagtggatatttttgtggttggccagcagtgtcccttgtttgaagttcctgggcctaactccaaaagggccaatacgcatattcgagactttctacaggtttttatttaccgccttttctggaaaagtaaagatcggccacggaggatacgaatggaagatataaaaaaagcctttccttcccattcagaaagcagcatccggaagaggctaaagctctgcgctgacttcaaacgcacagggatggactcaaactggtgggtgcttaagtctgattttcgtttaccaacggaagaagagatcagagctatggtgtcaccagagcagtgctgtgcttattatagcatgatagctgcagagcaacgactgaaggatgctggctatggtgagaaatccttttttgctccagaagaagaaaatgaggaagatttccagatgaagattgatgatgaagttcgcactgccccttggaacaccacaagggccttcattgctgccatgaagggcaagtgtctgctagaggtgactggggtggcagatcccacggggtgtggtgaaggattctcctatgtgaagattccaaacaaaccaacacagcagaaggtaggatgataaagaaccgcagccagtgaagaagacagtgacaggaacagatgcagaccttcgtcgcctttccctgaaaaatgccaagcaacttctacgtaaatttggtgtgcctgaggaagag

SEQ ID NO: 751 - DNA, 4833 bp, Homo sapiens
  source 1..4833: mol_type = genomic DNA
atcactgctgccgccatcatgtcagacacggacagcgacgaagattccgctggaggcggcccattttctttagcgggtttccttttcggcaacatcaatggagccgggcagctggagggggaaagcgtcttggatgatgaatgtaagaagcacttggcaggcttgggggctttggggctgggcagcctgatcactgaactcacggcaaatgaagaattgaccgggactgacggtgccttggtaaatgatgaagggtgggttaggagtacagaagatgctgtggactattcagacatcaatgaggtggcagaagatgaaagccgaagataccagcagacgatggggagcttgcagcccctttgccactcagattatgatgaagatgactatgatgctgattgtgaagacattgattgcaagttgatgcctcctccacctccacccccgggaccaatgaagaaggataaggaccaggattctattactggtgtgtctgaaaatggagaaggcatcatcttgccctccatcattgccccttcctctttggcctcagagaaagtggacttcagtagttcctctgactcagaatctgagatgggacctcaggaagcaacacaggcagaatctgaagatggaaagctgacccttccattggctgggattatgcagcatgatgccaccaagctgttgccaagtgtcacagaactttttccagaatttcgacctggaaaggtgttacgttttctacgtctttttggaccagggaagaatgtcccatctgtttggcggagtgctcggagaaagaggaagaagaagcaccgtgagctgatacaggaagagcagatccaggaggtggagtgctcagtagaatcagaagtcagccagaagtctttgtggaactacgactacgctccaccaccacctccagagcagtgtctctctgatgatgaaatcacgatgatggctcctgtggagtccaaattttcccaatcaactggagatatagataaagtgacagataccaaaccaagagtggctgagtggcgttatgggcctgcccgactgtggtatgatatgctgggtgtccctgaagatggcagtgggtttgactatggcttcaaactgagaaagacagaacatgaacctgtgataaaatctagaatgatagaggaatttaggaaacttgaggaaaacaatggcactgatcttctggctgatgaaaacttcctgatggtgacacagctgcattgggaggatgatatcatctgggatggggaggatgtcaaacacaaagggacaaaacctcagcgtgcaagcctggcaggctggcttccttctagcatgactaggaatgcgatggcttacaatgttcagcaaggttttgcagccactcttgatgatgacaaaccttggtactccatttttcccattgacaatgaggatctggtatatggacgctgggaggacaatatcatttgggatgctcaggccatgccccggctgttggaacctcctgttttgacacttgatcccaatgatgagaacctcattttggaaattcctgatgagaaggaagaggccacctctaactccccctccaaggagagtaagaaggaatcatctctgaagaagagtcgaattctcttagggaaaacaggagtcatcaaggaggaaccacagcagaacatgtctcagccagaagtgaaagatccatggaatctctccaatgatgagtattattatcccaagcaacagggtcttcgaggcacctttggagggaatattatccagcattcaattcctgctgtggaattacggcagcccttctttcccacccacatggggcccatcaaactccggcagttccatcgcccacctctgaaaaagtactcatttggtgcactttctcagccaggtccccactcagtccaacctttgctaaagcacatcaaaaaaaaggccaagatgagagaacaagagaggcaagcttcaggtggtggagagatgttttttatgcgcacacctcaggacctcacaggcaaagatggtgatcttattcttgcagaatatagtgaggaaaatggacccttaatgatgcaggttggcatggcaaccaagataaagaactattataaacggaaacctggaaaagatcctggagcaccagattgtaaatatggggaaactgtttactgccatacatctcctttcctgggttctctccatcctggccaattgctgcaagcatttgagaacaacctttttcgtgctccaatttatcttcataagatgccagaaactgatttcttgatcattcggacaagacagggttactatattcgggaattagtggatatttttgtggttggccagcagtgtcccttgtttgaagttcctgggcctaactccaaaagggccaatacgcatattcgagactttctacaggtttttatttaccgccttttctggaaaagtaaagatcggccacggaggatacgaatggaagatataaaaaaagcctttccttcccattcagaaagcagcatccggaagaggctaaagctctgcgctgacttcaaacgcacagggatggactcaaactggtgggtgcttaagtctgattttcgtttaccaacggaagaagagatcagagctatggtgtcaccagagcagtgctgtgcttattatagcatgatagctgcagagcaacgactgaaggatgctggctatggtgagaaatccttttttgctccagaagaagaaaatgaggaagatttccagatgaagattgatgatgaagttcgcactgccccttggaacaccacaagggccttcattgctgccatgaagggcaagtgtctgctagaggtgactggggtggcagatcccacggggtgtggtgaaggattctcctatgtgaagattccaaacaaaccaacacagcagaaggatgataaagaaccgcagccagtgaagaagacagtgacaggaacagatgcagaccttcgtcgcctttccctgaaaaatgccaagcaacttctacgtaaatttggtgtgcctgaggaagagattaaaaagttgtcccgctgggaagtgattgatgtggtgcgcacaatgtcaacagaacaggctcgttctggagaggggcccatgagtaaatttgcccgtggatcaaggttttctgtggctgagcatcaagagcgttacaaagaggaatgtcagcgcatctttgacctacagaacaaggttctgtcatcaactgaagtcttatcaactgacacagacagcagctcagctgaagatagtgactttgaagaaatgggaaagaacattgagaacatgttgcagaacaagaaaaccagctctcagctttcacgtgaacgggaggaacaggagcggaaggaactacagcgaatgctactggcagcaggctcagcagcatccggaaacaatcacagagatgatgacacagcttccgtgactagccttaactcttctgccactggacgctgtctcaagatttatcgcacgtttcgagatgaagaggggaaagagtatgttcgctgtgagacagtccgaaaaccagctgtcattgatgcctatgtgcgcatacggactacaaaagatgaggaattcattcgaaaatttgccctttttgatgaacaacatcgggaagagatgcgaaaagaacggcggaggattcaagagcaactgaggcggcttaagaggaaccaggaaaaggagaagcttaagggtcctcctgagaagaagcccaagaaaatgaaggagcgtcctgacctaaaactgaaatgtggggcatgtggtgccattggacacatgaggactaacaaattctgccccctctattatcaaacaaatgcgccaccttccaaccctgttgccatgacagaagaacaggaggaggagttggaaaagacagtcattcataatgataatgaagaacttatcaaggttgaagggaccaaaattgtcttggggaaacagctaattgagagtgcggatgaggttcgcagaaaatctctggttctcaagtttcctaaacagcagcttcctccaaagaagaaacggcgagttggaaccactgttcactgtgactatttgaatagacctcataagtccatccaccggcgccgcacagaccctatggtgacgctgtcgtccatcttggagtctatcatcaatgacatgagagatcttccaaatacataccctttccacactccagtcaatgcaaaggttgtaaaggactactacaaaatcatcactcggccaatggacctacaaacactccgcgaaaacgtgcgtaaacgcctctacccatctcgggaagagttcagagagcatctggagctaattgtgaaaaatagtgcaacctacaatgggccaaaacactcattgactcagatctctcaatccatgctggatctctgtgatgaaaaactcaaagagaaagaagacaaattagctcgcttagagaaagctatcaaccccttgctggatgatgatgaccaagtggcgttttctttcattctggacaacattgtcacccagaaaatgatggcagttccagattcttggccatttcatcacccagttaataagaaatttgttccagattattacaaagtgattgtcaatccaatggatttagagaccatacgtaagaacatctccaagcacaagtatcagagtcgggagagctttctggatgatgtaaaccttattctggccaacagtgttaagtataatgtatgatgaacatttgactcaacttgagaaggatatttgtactgctaaagaagcagctttgga

SEQ ID NO: 752 - DNA, 7507 bp, Homo sapiens
  source 1..7507: mol_type = genomic DNA
atcactgctgccgccatcatgtcagacacggacagcgacgaagattccgctggaggcggcccattttctttagcgggtttccttttcggcaacatcaatggagccgggcagctggagggggaaagcgtcttggatgatgaatgtaagaagcacttggcaggcttgggggctttggggctgggcagcctgatcactgaactcacggcaaatgaagaattgaccgggactgacggtgccttggtaaatgatgaagggtgggttaggagtacagaagatgctgtggactattcagacatcaatgaggtggcagaagatgaaagccgaagataccagcagacgatggggagcttgcagcccctttgccactcagattatgatgaagatgactatgatgctgattgtgaagacattgattgcaagttgatgcctcctccacctccacccccgggaccaatgaagaaggataaggaccaggattctattactggtgtgtctgaaaatggagaaggcatcatcttgccctccatcattgccccttcctctttggcctcagagaaagtggacttcagtagttcctctgactcagaatctgagatgggacctcaggaagcaacacaggcagaatctgaagatggaaagctgacccttccattggctgggattatgcagcatgatgccaccaagctgttgccaagtgtcacagaactttttccagaatttcgacctggaaaggtgttacgttttctacgtctttttggaccagggaagaatgtcccatctgtttggcggagtgctcggagaaagaggaagaagaagcaccgtgagctgatacaggaagagcagatccaggaggtggagtgctcagtagaatcagaagtcagccagaagtctttgtggaactacgactacgctccaccaccacctccagagcagtgtctctctgatgatgaaatcacgatgatggctcctgtggagtccaaattttcccaatcaactggagatatagataaagtgacagataccaaaccaagagtggctgagtggcgttatgggcctgcccgactgtggtatgatatgctgggtgtccctgaagatggcagtgggtttgactatggcttcaaactgagaaagacagaacatgaacctgtgataaaatctagaatgatagaggaatttaggaaacttgaggaaaacaatggcactgatcttctggctgatgaaaacttcctgatggtgacacagctgcattgggaggatgatatcatctgggatggggaggatgtcaaacacaaagggacaaaacctcagcgtgcaagcctggcaggctggcttccttctagcatgactaggaatgcgatggcttacaatgttcagcaaggttttgcagccactcttgatgatgacaaaccttggtactccatttttcccattgacaatgaggatctggtatatggacgctgggaggacaatatcatttgggatgctcaggccatgccccggctgttggaacctcctgttttgacacttgatcccaatgatgagaacctcattttggaaattcctgatgagaaggaagaggccacctctaactccccctccaaggagagtaagaaggaatcatctctgaagaagagtcgaattctcttagggaaaacaggagtcatcaaggaggaaccacagcagaacatgtctcagccagaagtgaaagatccatggaatctctccaatgatgagtattattatcccaagcaacagggtcttcgaggcacctttggagggaatattatccagcattcaattcctgctgtggaattacggcagcccttctttcccacccacatggggcccatcaaactccggcagttccatcgcccacctctgaaaaagtactcatttggtgcactttctcagccaggtccccactcagtccaacctttgctaaagcacatcaaaaaaaaggccaagatgagagaacaagagaggcaagcttcaggtggtggagagatgttttttatgcgcacacctcaggacctcacaggcaaagatggtgatcttattcttgcagaatatagtgaggaaaatggacccttaatgatgcaggttggcatggcaaccaagataaagaactattataaacggaaacctggaaaagatcctggagcaccagattgtaaatatggggaaactgtttactgccatacatctcctttcctgggttctctccatcctggccaattgctgcaagcatttgagaacaacctttttcgtgctccaatttatcttcataagatgccagaaactgatttcttgatcattcggacaagacagggttactatattcgggaattagtggatatttttgtggttggccagcagtgtcccttgtttgaagttcctgggcctaactccaaaagggccaatacgcatattcgagactttctacaggtttttatttaccgccttttctggaaaagtaaagatcggccacggaggatacgaatggaagatataaaaaaagcctttccttcccattcagaaagcagcatccggaagaggctaaagctctgcgctgacttcaaacgcacagggatggactcaaactggtgggtgcttaagtctgattttcgtttaccaacggaagaagagatcagagctatggtgtcaccagagcagtgctgtgcttattatagcatgatagctgcagagcaacgactgaaggatgctggctatggtgagaaatccttttttgctccagaagaagaaaatgaggaagatttccagatgaagattgatgatgaagttcgcactgccccttggaacaccacaagggccttcattgctgccatgaagggcaagtgtctgctagaggtgactggggtggcagatcccacggggtgtggtgaaggattctcctatgtgaagattccaaacaaaccaacacagcagaaggatgataaagaaccgcagccagtgaagaagacagtgacaggaacagatgcagaccttcgtcgcctttccctgaaaaatgccaagcaacttctacgtaaatttggtgtgcctgaggaagagattaaaaagttgtcccgctgggaagtgattgatgtggtgcgcacaatgtcaacagaacaggctcgttctggagaggggcccatgagtaaatttgcccgtggatcaaggttttctgtggctgagcatcaagagcgttacaaagaggaatgtcagcgcatctttgacctacagaacaaggttctgtcatcaactgaagtcttatcaactgacacagacagcagctcagctgaagatagtgactttgaagaaatgggaaagaacattgagaacatgttgcagaacaagaaaaccagctctcagctttcacgtgaacgggaggaacaggagcggaaggaactacagcgaatgctactggcagcaggctcagcagcatccggaaacaatcacagagatgatgacacagcttccgtgactagccttaactcttctgccactggacgctgtctcaagatttatcgcacgtttcgagatgaagaggggaaagagtatgttcgctgtgagacagtccgaaaaccagctgtcattgatgcctatgtgcgcatacggactacaaaagatgaggaattcattcgaaaatttgccctttttgatgaacaacatcgggaagagatgcgaaaagaacggcggaggattcaagagcaactgaggcggcttaagaggaaccaggaaaaggagaagcttaagggtcctcctgagaagaagcccaagaaaatgaaggagcgtcctgacctaaaactgaaatgtggggcatgtggtgccattggacacatgaggactaacaaattctgccccctctattatcaaacaaatgcgccaccttccaaccctgttgccatgacagaagaacaggaggaggagttggaaaagacagtcattcataatgataatgaagaacttatcaaggttgaagggaccaaaattgtcttggggaaacagctaattgagagtgcggatgaggttcgcagaaaatctctggttctcaagtttcctaaacagcagcttcctccaaagaagaaacggcgagttggaaccactgttcactgtgactatttgaatagacctcataagtccatccaccggcgccgcacagaccctatggtgacgctgtcgtccatcttggagtctatcatcaatgacatgagagatcttccaaatacataccctttccacactccagtcaatgcaaaggttgtaaaggactactacaaaatcatcactcggccaatggacctacaaacactccgcgaaaacgtgcgtaaacgcctctacccatctcgggaagagttcagagagcatctggagctaattgtgaaaaatagtgcaacctacaatgggccaaaacactcattgactcagatctctcaatccatgctggatctctgtgatgaaaaactcaaagagaaagaagacaaattagctcgcttagagaaagctatcaaccccttgctggatgatgatgaccaagtggcgttttctttcattctggacaacattgtcacccagaaaatgatggcagttccagattcttggccatttcatcacccagttaataagaaatttgttccagattattacaaagtgattgtcaatccaatggatttagagaccatacgtaagaacatctccaagcacaagtatcagagtcgggagagctttctggatgatgtaaaccttattctggccaacagtgttaagtataatggacctgagagtcagtatactaagactgcccaggagattgtgaacgtctgttaccagacattgactgagtatgatgaacatttgactcaacttgagaaggatatttgtactgctaaagaagcagctttggaggaagcagaattagaaagcctggacccaatgaccccagggccctacacgcctcagcctcctgatttgtatgataccaacacatccctcagtatgtctcgagatgcctctgtatttcaagatgagagcaatatgtctgtcttggatattcccagtgccactccagaaaagcaggtaacacagatgcgccagggccgaggtaggctgggcgaggaagactctgatgtagatattgaagggtatgatgatgaggaggaggatgggaaacctaagactccagccccagaaggtgaagatggagatggtgatcttgcagatgaagaggaaggaactgtacaacagcctcaagccagtgtcctgtatgaggatttgcttatgtctgaaggagaagatgatgaggaagatgctgggagtgatgaagaaggagacaatcctttctctgctatccagctgagtgaaagtggaagtgactctgatgtgggatctggtggaataagacccaaacaaccccgcatgcttcaggagaacacaaggatggacatggaaaatgaagaaagcatgatgtcctatgagggagacggtggggaggcttcccatggtttggaggatagcaacatcagttatgggagctatgaggagcctgatcccaagtcgaacacccaagacacaagcttcagcagcatcggtgggtatgaggtatcagaggaggaagaagatgaggaggaggaagagcagcgctctgggccgagcgtactaagccaggtccacctgtcagaggacgaggaggacagtgaggatttccactccattgctggggacagtgacttggactctgatgaatgaggcttcctttgggcctccttggtcagccttccctgttctccagcctaggtggttcacctttccccaatttgttcatatttgtacagtatctgatcctgaaatcatgaaattaactaacaccttagcctttttaaaagtagtaagtaaatgataataaatcacctctcctaatcttcctggggcaatgtcaccctttgatttaaaacaaagcaaccccctttcccctaccactacggaaaagagcaagctcatttttccgtgtcctcctttatttaactccatttattgcttttggtataatttttccctggggaaggaggggaaattatgaaagaactagtaactttatgtcctcttgatgtattaggaaatttccggccaggcgtggtggctcacacctgtaatctcagcactctgggaggccgaggcgggcagatcacctgaggtcagaagttcgagaccagcttggccaacatggcgaaaccgcatctctactaaaaatacaaaaattagccaggctggagcagatgagagccctcctgctgggacagagaattgggttctagtggactctgtgctacacttaaacctgtgagacaaaccgcccattattttattatttaattatgcaatgcctagttcctaaatggattggaggcaaattaccgtaaattttgaaacagcctatatgtcagaaatgataatgttgccacctaaatgttttctgtcccccccaccctccccaggggaaatggtaggaaaatggtaagtttcttagggcaaagactgtgtcttctgtttcttttcatgcttaggatatggttctgtgcatagtaggtactcagtaaatgttcctagaatcataaaatcctcaacagatatgttactgagcatctgcttttcatgataagcactctatcagatccttgggatgcaaaggtaaataagacaaatcccttttacccaaagagctcaccatcaagttgggggagggaaagtggaattcaaaacatgttaataaatcatcatagtactgtgagataagtgcaattaagaagctagttataaagtataggggaaatagaggagtaatcatgtctgaaaagtcaggaaagtcttcctagaggtaatttttaagctgattgttttagaattagtagaagcttgccagatggaaaagtccaggcaaagtgtaacatgaatgggaaaggccacagtctagaaatggcagagtgtgttcctagtttgtttgtttgtttgtttgtacctgccttgttccaggaaggatttaatgtggtttatattccagtcctttaatgctggaagggctgagatgagactgaaagatgggcaggaagtatatcatcacaagctttgtgtttgatgttaatgtgtatgatttttatattatgggaaataagctcttagaggagtgatataatcaggtttgtgttttagaaatctgtgtaatgaatgaatgaagaaagaaattgaagaatcatgtaacatatgtgatcgcatttttgtaaaagaaccatgtgtgtttatatgtgtttatatatatacttgtgtatgcaaaggtaaaagtctgaaaggatatatgctaactgttcacaatgataaccccccaggaatgggattggaggggagggggcttctgtgtttgttatgtatgctgggtgggatattgtgcttttatttctatattgtttgaatttttttacagtatgtattatttttgtaataaaaattttaaaaaattcca

SEQ ID NO: 753 - DNA, 7504 bp, Homo sapiens
  source 1..7504: mol_type = genomic DNA
atcactgctgccgccatcatgtcagacacggacagcgacgaagattccgctggaggcggcccattttctttagcgggtttccttttcggcaacatcaatggagccgggcagctggagggggaaagcgtcttggatgatgaatgtaagaagcacttggcaggcttgggggctttggggctgggcagcctgatcactgaactcacggcaaatgaagaattgaccgggactgacggtgccttggtaaatgatgaagggtgggttaggagtacagaagatgctgtggactattcagacatcaatgaggtggcagaagatgaaagccgaagataccagcagacgatggggagcttgcagcccctttgccactcagattatgatgaagatgactatgatgctgattgtgaagacattgattgcaagttgatgcctcctccacctccacccccgggaccaatgaagaaggataaggaccaggattctattactggtgtgtctgaaaatggagaaggcatcatcttgccctccatcattgccccttcctctttggcctcagagaaagtggacttcagtagttcctctgactcagaatctgagatgggacctcaggaagcaacacaggcagaatctgaagatggaaagctgacccttccattggctgggattatgcagcatgatgccaccaagctgttgccaagtgtcacagaactttttccagaatttcgacctggaaaggtgttacgttttctacgtctttttggaccagggaagaatgtcccatctgtttggcggagtgctcggagaaagaggaagaagaagcaccgtgagctgatacaggaagagcagatccaggaggtggagtgctcagtagaatcagaagtcagccagaagtctttgtggaactacgactacgctccaccaccacctccagagcagtgtctctctgatgatgaaatcacgatgatggctcctgtggagtccaaattttcccaatcaactggagatatagataaagtgacagataccaaaccaagagtggctgagtggcgttatgggcctgcccgactgtggtatgatatgctgggtgtccctgaagatggcagtgggtttgactatggcttcaaactgagaaagacagaacatgaacctgtgataaaatctagaatgatagaggaatttaggaaacttgaggaaaacaatggcactgatcttctggctgatgaaaacttcctgatggtgacacagctgcattgggaggatgatatcatctgggatggggaggatgtcaaacacaaagggacaaaacctcagcgtgcaagcctggcaggctggcttccttctagcatgactaggaatgcgatggcttacaatgttcagcaaggttttgcagccactcttgatgatgacaaaccttggtactccatttttcccattgacaatgaggatctggtatatggacgctgggaggacaatatcatttgggatgctcaggccatgccccggctgttggaacctcctgttttgacacttgatcccaatgatgagaacctcattttggaaattcctgatgagaaggaagaggccacctctaactccccctccaaggagagtaagaaggaatcatctctgaagaagagtcgaattctcttagggaaaacaggagtcatcaaggaggaaccacagcagaacatgtctcagccagaagtgaaagatccatggaatctctccaatgatgagtattattatcccaagcaacagggtcttcgaggcacctttggagggaatattatccagcattcaattcctgctgtggaattacggcagcccttctttcccacccacatggggcccatcaaactccggcagttccatcgcccacctctgaaaaagtactcatttggtgcactttctcagccaggtccccactcagtccaacctttgctaaagcacatcaaaaaaaaggccaagatgagagaacaagagaggcaagcttcaggtggtggagagatgttttttatgcgcacacctcaggacctcacaggcaaagatggtgatcttattcttgcagaatatagtgaggaaaatggacccttaatgatgcaggttggcatggcaaccaagataaagaactattataaacggaaacctggaaaagatcctggagcaccagattgtaaatatggggaaactgtttactgccatacatctcctttcctgggttctctccatcctggccaattgctgcaagcatttgagaacaacctttttcgtgctccaatttatcttcataagatgccagaaactgatttcttgatcattcggacaagacagggttactatattcgggaattagtggatatttttgtggttggccagcagtgtcccttgtttgaagttcctgggcctaactccaaaagggccaatacgcatattcgagactttctacaggtttttatttaccgccttttctggaaaagtaaagatcggccacggaggatacgaatggaagatataaaaaaagcctttccttcccattcagaaagcagcatccggaagaggctaaagctctgcgctgacttcaaacgcacagggatggactcaaactggtgggtgcttaagtctgattttcgtttaccaacggaagaagagatcagagctatggtgtcaccagagcagtgctgtgcttattatagcatgatagctgcagagcaacgactgaaggatgctggctatggtgagaaatccttttttgctccagaagaagaaaatgaggaagatttccagatgaagattgatgatgaagttcgcactgccccttggaacaccacaagggccttcattgctgccatgaagggcaagtgtctgctagaggtgactggggtggcagatcccacggggtgtggtgaaggattctcctatgtgaagattccaaacaaaccaacacagcagaaggatgataaagaaccgcagccagtgaagaagacagtgacaggaacagatgcagaccttcgtcgcctttccctgaaaaatgccaagcaacttctacgtaaatttggtgtgcctgaggaagagattaaaaagttgtcccgctgggaagtgattgatgtggtgcgcacaatgtcaacagaacaggctcgttctggagaggggcccatgagtaaatttgcccgtggatcaaggttttctgtggctgagcatcaagagcgttacaaagaggaatgtcagcgcatctttgacctacagaacaaggttctgtcatcaactgaagtcttatcaactgacacagacagcagctcagctgaagatagtgactttgaagaaatgggaaagaacattgagaacatgttgcagaacaagaaaaccagctctcagctttcacgtgaacgggaggaacaggagcggaaggaactacagcgaatgctactggcaggctcagcagcatccggaaacaatcacagagatgatgacacagcttccgtgactagccttaactcttctgccactggacgctgtctcaagatttatcgcacgtttcgagatgaagaggggaaagagtatgttcgctgtgagacagtccgaaaaccagctgtcattgatgcctatgtgcgcatacggactacaaaagatgaggaattcattcgaaaatttgccctttttgatgaacaacatcgggaagagatgcgaaaagaacggcggaggattcaagagcaactgaggcggcttaagaggaaccaggaaaaggagaagcttaagggtcctcctgagaagaagcccaagaaaatgaaggagcgtcctgacctaaaactgaaatgtggggcatgtggtgccattggacacatgaggactaacaaattctgccccctctattatcaaacaaatgcgccaccttccaaccctgttgccatgacagaagaacaggaggaggagttggaaaagacagtcattcataatgataatgaagaacttatcaaggttgaagggaccaaaattgtcttggggaaacagctaattgagagtgcggatgaggttcgcagaaaatctctggttctcaagtttcctaaacagcagcttcctccaaagaagaaacggcgagttggaaccactgttcactgtgactatttgaatagacctcataagtccatccaccggcgccgcacagaccctatggtgacgctgtcgtccatcttggagtctatcatcaatgacatgagagatcttccaaatacataccctttccacactccagtcaatgcaaaggttgtaaaggactactacaaaatcatcactcggccaatggacctacaaacactccgcgaaaacgtgcgtaaacgcctctacccatctcgggaagagttcagagagcatctggagctaattgtgaaaaatagtgcaacctacaatgggccaaaacactcattgactcagatctctcaatccatgctggatctctgtgatgaaaaactcaaagagaaagaagacaaattagctcgcttagagaaagctatcaaccccttgctggatgatgatgaccaagtggcgttttctttcattctggacaacattgtcacccagaaaatgatggcagttccagattcttggccatttcatcacccagttaataagaaatttgttccagattattacaaagtgattgtcaatccaatggatttagagaccatacgtaagaacatctccaagcacaagtatcagagtcgggagagctttctggatgatgtaaaccttattctggccaacagtgttaagtataatggacctgagagtcagtatactaagactgcccaggagattgtgaacgtctgttaccagacattgactgagtatgatgaacatttgactcaacttgagaaggatatttgtactgctaaagaagcagctttggaggaagcagaattagaaagcctggacccaatgaccccagggccctacacgcctcagcctcctgatttgtatgataccaacacatccctcagtatgtctcgagatgcctctgtatttcaagatgagagcaatatgtctgtcttggatattcccagtgccactccagaaaagcaggtaacacagatgcgccagggccgaggtaggctgggcgaggaagactctgatgtagatattgaagggtatgatgatgaggaggaggatgggaaacctaagactccagccccagaaggtgaagatggagatggtgatcttgcagatgaagaggaaggaactgtacaacagcctcaagccagtgtcctgtatgaggatttgcttatgtctgaaggagaagatgatgaggaagatgctgggagtgatgaagaaggagacaatcctttctctgctatccagctgagtgaaagtggaagtgactctgatgtgggatctggtggaataagacccaaacaaccccgcatgcttcaggagaacacaaggatggacatggaaaatgaagaaagcatgatgtcctatgagggagacggtggggaggcttcccatggtttggaggatagcaacatcagttatgggagctatgaggagcctgatcccaagtcgaacacccaagacacaagcttcagcagcatcggtgggtatgaggtatcagaggaggaagaagatgaggaggaggaagagcagcgctctgggccgagcgtactaagccaggtccacctgtcagaggacgaggaggacagtgaggatttccactccattgctggggacagtgacttggactctgatgaatgaggcttcctttgggcctccttggtcagccttccctgttctccagcctaggtggttcacctttccccaatttgttcatatttgtacagtatctgatcctgaaatcatgaaattaactaacaccttagcctttttaaaagtagtaagtaaatgataataaatcacctctcctaatcttcctggggcaatgtcaccctttgatttaaaacaaagcaaccccctttcccctaccactacggaaaagagcaagctcatttttccgtgtcctcctttatttaactccatttattgcttttggtataatttttccctggggaaggaggggaaattatgaaagaactagtaactttatgtcctcttgatgtattaggaaatttccggccaggcgtggtggctcacacctgtaatctcagcactctgggaggccgaggcgggcagatcacctgaggtcagaagttcgagaccagcttggccaacatggcgaaaccgcatctctactaaaaatacaaaaattagccaggctggagcagatgagagccctcctgctgggacagagaattgggttctagtggactctgtgctacacttaaacctgtgagacaaaccgcccattattttattatttaattatgcaatgcctagttcctaaatggattggaggcaaattaccgtaaattttgaaacagcctatatgtcagaaatgataatgttgccacctaaatgttttctgtcccccccaccctccccaggggaaatggtaggaaaatggtaagtttcttagggcaaagactgtgtcttctgtttcttttcatgcttaggatatggttctgtgcatagtaggtactcagtaaatgttcctagaatcataaaatcctcaacagatatgttactgagcatctgcttttcatgataagcactctatcagatccttgggatgcaaaggtaaataagacaaatcccttttacccaaagagctcaccatcaagttgggggagggaaagtggaattcaaaacatgttaataaatcatcatagtactgtgagataagtgcaattaagaagctagttataaagtataggggaaatagaggagtaatcatgtctgaaaagtcaggaaagtcttcctagaggtaatttttaagctgattgttttagaattagtagaagcttgccagatggaaaagtccaggcaaagtgtaacatgaatgggaaaggccacagtctagaaatggcagagtgtgttcctagtttgtttgtttgtttgtttgtacctgccttgttccaggaaggatttaatgtggtttatattccagtcctttaatgctggaagggctgagatgagactgaaagatgggcaggaagtatatcatcacaagctttgtgtttgatgttaatgtgtatgatttttatattatgggaaataagctcttagaggagtgatataatcaggtttgtgttttagaaatctgtgtaatgaatgaatgaagaaagaaattgaagaatcatgtaacatatgtgatcgcatttttgtaaaagaaccatgtgtgtttatatgtgtttatatatatacttgtgtatgcaaaggtaaaagtctgaaaggatatatgctaactgttcacaatgataaccccccaggaatgggattggaggggagggggcttctgtgtttgttatgtatgctgggtgggatattgtgcttttatttctatattgtttgaatttttttacagtatgtattatttttgtaataaaaattttaaaaaattcca

SEQ ID NO: 754 - DNA, 7444 bp, Homo sapiens
  source 1..7444: mol_type = genomic DNA
atcactgctgccgccatcatgtcagacacggacagcgacgaagattccgctggaggcggcccattttctttagcgggtttccttttcggcaacatcaatggagccgggcagctggagggggaaagcgtcttggatgatgaatgtaagaagcacttggcaggcttgggggctttggggctgggcagcctgatcactgaactcacggcaaatgaagaattgaccgggactgacggtgccttggtaaatgatgaagggtgggttaggagtacagaagatgctgtggactattcagacatcaatgaggtggcagaagatgaaagccgaagataccagcagacgatggggagcttgcagcccctttgccactcagattatgatgaagatgactatgatgctgattgtgaagacattgattgcaagttgatgcctcctccacctccacccccgggaccaatgaagaaggataaggaccaggattctattactggtgagaaagtggacttcagtagttcctctgactcagaatctgagatgggacctcaggaagcaacacaggcagaatctgaagatggaaagctgacccttccattggctgggattatgcagcatgatgccaccaagctgttgccaagtgtcacagaactttttccagaatttcgacctggaaaggtgttacgttttctacgtctttttggaccagggaagaatgtcccatctgtttggcggagtgctcggagaaagaggaagaagaagcaccgtgagctgatacaggaagagcagatccaggaggtggagtgctcagtagaatcagaagtcagccagaagtctttgtggaactacgactacgctccaccaccacctccagagcagtgtctctctgatgatgaaatcacgatgatggctcctgtggagtccaaattttcccaatcaactggagatatagataaagtgacagataccaaaccaagagtggctgagtggcgttatgggcctgcccgactgtggtatgatatgctgggtgtccctgaagatggcagtgggtttgactatggcttcaaactgagaaagacagaacatgaacctgtgataaaatctagaatgatagaggaatttaggaaacttgaggaaaacaatggcactgatcttctggctgatgaaaacttcctgatggtgacacagctgcattgggaggatgatatcatctgggatggggaggatgtcaaacacaaagggacaaaacctcagcgtgcaagcctggcaggctggcttccttctagcatgactaggaatgcgatggcttacaatgttcagcaaggttttgcagccactcttgatgatgacaaaccttggtactccatttttcccattgacaatgaggatctggtatatggacgctgggaggacaatatcatttgggatgctcaggccatgccccggctgttggaacctcctgttttgacacttgatcccaatgatgagaacctcattttggaaattcctgatgagaaggaagaggccacctctaactccccctccaaggagagtaagaaggaatcatctctgaagaagagtcgaattctcttagggaaaacaggagtcatcaaggaggaaccacagcagaacatgtctcagccagaagtgaaagatccatggaatctctccaatgatgagtattattatcccaagcaacagggtcttcgaggcacctttggagggaatattatccagcattcaattcctgctgtggaattacggcagcccttctttcccacccacatggggcccatcaaactccggcagttccatcgcccacctctgaaaaagtactcatttggtgcactttctcagccaggtccccactcagtccaacctttgctaaagcacatcaaaaaaaaggccaagatgagagaacaagagaggcaagcttcaggtggtggagagatgttttttatgcgcacacctcaggacctcacaggcaaagatggtgatcttattcttgcagaatatagtgaggaaaatggacccttaatgatgcaggttggcatggcaaccaagataaagaactattataaacggaaacctggaaaagatcctggagcaccagattgtaaatatggggaaactgtttactgccatacatctcctttcctgggttctctccatcctggccaattgctgcaagcatttgagaacaacctttttcgtgctccaatttatcttcataagatgccagaaactgatttcttgatcattcggacaagacagggttactatattcgggaattagtggatatttttgtggttggccagcagtgtcccttgtttgaagttcctgggcctaactccaaaagggccaatacgcatattcgagactttctacaggtttttatttaccgccttttctggaaaagtaaagatcggccacggaggatacgaatggaagatataaaaaaagcctttccttcccattcagaaagcagcatccggaagaggctaaagctctgcgctgacttcaaacgcacagggatggactcaaactggtgggtgcttaagtctgattttcgtttaccaacggaagaagagatcagagctatggtgtcaccagagcagtgctgtgcttattatagcatgatagctgcagagcaacgactgaaggatgctggctatggtgagaaatccttttttgctccagaagaagaaaatgaggaagatttccagatgaagattgatgatgaagttcgcactgccccttggaacaccacaagggccttcattgctgccatgaagggcaagtgtctgctagaggtgactggggtggcagatcccacggggtgtggtgaaggattctcctatgtgaagattccaaacaaaccaacacagcagaaggatgataaagaaccgcagccagtgaagaagacagtgacaggaacagatgcagaccttcgtcgcctttccctgaaaaatgccaagcaacttctacgtaaatttggtgtgcctgaggaagagattaaaaagttgtcccgctgggaagtgattgatgtggtgcgcacaatgtcaacagaacaggctcgttctggagaggggcccatgagtaaatttgcccgtggatcaaggttttctgtggctgagcatcaagagcgttacaaagaggaatgtcagcgcatctttgacctacagaacaaggttctgtcatcaactgaagtcttatcaactgacacagacagcagctcagctgaagatagtgactttgaagaaatgggaaagaacattgagaacatgttgcagaacaagaaaaccagctctcagctttcacgtgaacgggaggaacaggagcggaaggaactacagcgaatgctactggcagcaggctcagcagcatccggaaacaatcacagagatgatgacacagcttccgtgactagccttaactcttctgccactggacgctgtctcaagatttatcgcacgtttcgagatgaagaggggaaagagtatgttcgctgtgagacagtccgaaaaccagctgtcattgatgcctatgtgcgcatacggactacaaaagatgaggaattcattcgaaaatttgccctttttgatgaacaacatcgggaagagatgcgaaaagaacggcggaggattcaagagcaactgaggcggcttaagaggaaccaggaaaaggagaagcttaagggtcctcctgagaagaagcccaagaaaatgaaggagcgtcctgacctaaaactgaaatgtggggcatgtggtgccattggacacatgaggactaacaaattctgccccctctattatcaaacaaatgcgccaccttccaaccctgttgccatgacagaagaacaggaggaggagttggaaaagacagtcattcataatgataatgaagaacttatcaaggttgaagggaccaaaattgtcttggggaaacagctaattgagagtgcggatgaggttcgcagaaaatctctggttctcaagtttcctaaacagcagcttcctccaaagaagaaacggcgagttggaaccactgttcactgtgactatttgaatagacctcataagtccatccaccggcgccgcacagaccctatggtgacgctgtcgtccatcttggagtctatcatcaatgacatgagagatcttccaaatacataccctttccacactccagtcaatgcaaaggttgtaaaggactactacaaaatcatcactcggccaatggacctacaaacactccgcgaaaacgtgcgtaaacgcctctacccatctcgggaagagttcagagagcatctggagctaattgtgaaaaatagtgcaacctacaatgggccaaaacactcattgactcagatctctcaatccatgctggatctctgtgatgaaaaactcaaagagaaagaagacaaattagctcgcttagagaaagctatcaaccccttgctggatgatgatgaccaagtggcgttttctttcattctggacaacattgtcacccagaaaatgatggcagttccagattcttggccatttcatcacccagttaataagaaatttgttccagattattacaaagtgattgtcaatccaatggatttagagaccatacgtaagaacatctccaagcacaagtatcagagtcgggagagctttctggatgatgtaaaccttattctggccaacagtgttaagtataatggacctgagagtcagtatactaagactgcccaggagattgtgaacgtctgttaccagacattgactgagtatgatgaacatttgactcaacttgagaaggatatttgtactgctaaagaagcagctttggaggaagcagaattagaaagcctggacccaatgaccccagggccctacacgcctcagcctcctgatttgtatgataccaacacatccctcagtatgtctcgagatgcctctgtatttcaagatgagagcaatatgtctgtcttggatattcccagtgccactccagaaaagcaggtaacacagatgcgccagggccgaggtaggctgggcgaggaagactctgatgtagatattgaagggtatgatgatgaggaggaggatgggaaacctaagactccagccccagaaggtgaagatggagatggtgatcttgcagatgaagaggaaggaactgtacaacagcctcaagccagtgtcctgtatgaggatttgcttatgtctgaaggagaagatgatgaggaagatgctgggagtgatgaagaaggagacaatcctttctctgctatccagctgagtgaaagtggaagtgactctgatgtgggatctggtggaataagacccaaacaaccccgcatgcttcaggagaacacaaggatggacatggaaaatgaagaaagcatgatgtcctatgagggagacggtggggaggcttcccatggtttggaggatagcaacatcagttatgggagctatgaggagcctgatcccaagtcgaacacccaagacacaagcttcagcagcatcggtgggtatgaggtatcagaggaggaagaagatgaggaggaggaagagcagcgctctgggccgagcgtactaagccaggtccacctgtcagaggacgaggaggacagtgaggatttccactccattgctggggacagtgacttggactctgatgaatgaggcttcctttgggcctccttggtcagccttccctgttctccagcctaggtggttcacctttccccaatttgttcatatttgtacagtatctgatcctgaaatcatgaaattaactaacaccttagcctttttaaaagtagtaagtaaatgataataaatcacctctcctaatcttcctggggcaatgtcaccctttgatttaaaacaaagcaaccccctttcccctaccactacggaaaagagcaagctcatttttccgtgtcctcctttatttaactccatttattgcttttggtataatttttccctggggaaggaggggaaattatgaaagaactagtaactttatgtcctcttgatgtattaggaaatttccggccaggcgtggtggctcacacctgtaatctcagcactctgggaggccgaggcgggcagatcacctgaggtcagaagttcgagaccagcttggccaacatggcgaaaccgcatctctactaaaaatacaaaaattagccaggctggagcagatgagagccctcctgctgggacagagaattgggttctagtggactctgtgctacacttaaacctgtgagacaaaccgcccattattttattatttaattatgcaatgcctagttcctaaatggattggaggcaaattaccgtaaattttgaaacagcctatatgtcagaaatgataatgttgccacctaaatgttttctgtcccccccaccctccccaggggaaatggtaggaaaatggtaagtttcttagggcaaagactgtgtcttctgtttcttttcatgcttaggatatggttctgtgcatagtaggtactcagtaaatgttcctagaatcataaaatcctcaacagatatgttactgagcatctgcttttcatgataagcactctatcagatccttgggatgcaaaggtaaataagacaaatcccttttacccaaagagctcaccatcaagttgggggagggaaagtggaattcaaaacatgttaataaatcatcatagtactgtgagataagtgcaattaagaagctagttataaagtataggggaaatagaggagtaatcatgtctgaaaagtcaggaaagtcttcctagaggtaatttttaagctgattgttttagaattagtagaagcttgccagatggaaaagtccaggcaaagtgtaacatgaatgggaaaggccacagtctagaaatggcagagtgtgttcctagtttgtttgtttgtttgtttgtacctgccttgttccaggaaggatttaatgtggtttatattccagtcctttaatgctggaagggctgagatgagactgaaagatgggcaggaagtatatcatcacaagctttgtgtttgatgttaatgtgtatgatttttatattatgggaaataagctcttagaggagtgatataatcaggtttgtgttttagaaatctgtgtaatgaatgaatgaagaaagaaattgaagaatcatgtaacatatgtgatcgcatttttgtaaaagaaccatgtgtgtttatatgtgtttatatatatacttgtgtatgcaaaggtaaaagtctgaaaggatatatgctaactgttcacaatgataaccccccaggaatgggattggaggggagggggcttctgtgtttgttatgtatgctgggtgggatattgtgcttttatttctatattgtttgaatttttttacagtatgtattatttttgtaataaaaattttaaaaaattcca

SEQ ID NO: 755 - DNA, 7441 bp, Homo sapiens
  source 1..7441: mol_type = genomic DNA
atcactgctgccgccatcatgtcagacacggacagcgacgaagattccgctggaggcggcccattttctttagcgggtttccttttcggcaacatcaatggagccgggcagctggagggggaaagcgtcttggatgatgaatgtaagaagcacttggcaggcttgggggctttggggctgggcagcctgatcactgaactcacggcaaatgaagaattgaccgggactgacggtgccttggtaaatgatgaagggtgggttaggagtacagaagatgctgtggactattcagacatcaatgaggtggcagaagatgaaagccgaagataccagcagacgatggggagcttgcagcccctttgccactcagattatgatgaagatgactatgatgctgattgtgaagacattgattgcaagttgatgcctcctccacctccacccccgggaccaatgaagaaggataaggaccaggattctattactggtgagaaagtggacttcagtagttcctctgactcagaatctgagatgggacctcaggaagcaacacaggcagaatctgaagatggaaagctgacccttccattggctgggattatgcagcatgatgccaccaagctgttgccaagtgtcacagaactttttccagaatttcgacctggaaaggtgttacgttttctacgtctttttggaccagggaagaatgtcccatctgtttggcggagtgctcggagaaagaggaagaagaagcaccgtgagctgatacaggaagagcagatccaggaggtggagtgctcagtagaatcagaagtcagccagaagtctttgtggaactacgactacgctccaccaccacctccagagcagtgtctctctgatgatgaaatcacgatgatggctcctgtggagtccaaattttcccaatcaactggagatatagataaagtgacagataccaaaccaagagtggctgagtggcgttatgggcctgcccgactgtggtatgatatgctgggtgtccctgaagatggcagtgggtttgactatggcttcaaactgagaaagacagaacatgaacctgtgataaaatctagaatgatagaggaatttaggaaacttgaggaaaacaatggcactgatcttctggctgatgaaaacttcctgatggtgacacagctgcattgggaggatgatatcatctgggatggggaggatgtcaaacacaaagggacaaaacctcagcgtgcaagcctggcaggctggcttccttctagcatgactaggaatgcgatggcttacaatgttcagcaaggttttgcagccactcttgatgatgacaaaccttggtactccatttttcccattgacaatgaggatctggtatatggacgctgggaggacaatatcatttgggatgctcaggccatgccccggctgttggaacctcctgttttgacacttgatcccaatgatgagaacctcattttggaaattcctgatgagaaggaagaggccacctctaactccccctccaaggagagtaagaaggaatcatctctgaagaagagtcgaattctcttagggaaaacaggagtcatcaaggaggaaccacagcagaacatgtctcagccagaagtgaaagatccatggaatctctccaatgatgagtattattatcccaagcaacagggtcttcgaggcacctttggagggaatattatccagcattcaattcctgctgtggaattacggcagcccttctttcccacccacatggggcccatcaaactccggcagttccatcgcccacctctgaaaaagtactcatttggtgcactttctcagccaggtccccactcagtccaacctttgctaaagcacatcaaaaaaaaggccaagatgagagaacaagagaggcaagcttcaggtggtggagagatgttttttatgcgcacacctcaggacctcacaggcaaagatggtgatcttattcttgcagaatatagtgaggaaaatggacccttaatgatgcaggttggcatggcaaccaagataaagaactattataaacggaaacctggaaaagatcctggagcaccagattgtaaatatggggaaactgtttactgccatacatctcctttcctgggttctctccatcctggccaattgctgcaagcatttgagaacaacctttttcgtgctccaatttatcttcataagatgccagaaactgatttcttgatcattcggacaagacagggttactatattcgggaattagtggatatttttgtggttggccagcagtgtcccttgtttgaagttcctgggcctaactccaaaagggccaatacgcatattcgagactttctacaggtttttatttaccgccttttctggaaaagtaaagatcggccacggaggatacgaatggaagatataaaaaaagcctttccttcccattcagaaagcagcatccggaagaggctaaagctctgcgctgacttcaaacgcacagggatggactcaaactggtgggtgcttaagtctgattttcgtttaccaacggaagaagagatcagagctatggtgtcaccagagcagtgctgtgcttattatagcatgatagctgcagagcaacgactgaaggatgctggctatggtgagaaatccttttttgctccagaagaagaaaatgaggaagatttccagatgaagattgatgatgaagttcgcactgccccttggaacaccacaagggccttcattgctgccatgaagggcaagtgtctgctagaggtgactggggtggcagatcccacggggtgtggtgaaggattctcctatgtgaagattccaaacaaaccaacacagcagaaggatgataaagaaccgcagccagtgaagaagacagtgacaggaacagatgcagaccttcgtcgcctttccctgaaaaatgccaagcaacttctacgtaaatttggtgtgcctgaggaagagattaaaaagttgtcccgctgggaagtgattgatgtggtgcgcacaatgtcaacagaacaggctcgttctggagaggggcccatgagtaaatttgcccgtggatcaaggttttctgtggctgagcatcaagagcgttacaaagaggaatgtcagcgcatctttgacctacagaacaaggttctgtcatcaactgaagtcttatcaactgacacagacagcagctcagctgaagatagtgactttgaagaaatgggaaagaacattgagaacatgttgcagaacaagaaaaccagctctcagctttcacgtgaacgggaggaacaggagcggaaggaactacagcgaatgctactggcaggctcagcagcatccggaaacaatcacagagatgatgacacagcttccgtgactagccttaactcttctgccactggacgctgtctcaagatttatcgcacgtttcgagatgaagaggggaaagagtatgttcgctgtgagacagtccgaaaaccagctgtcattgatgcctatgtgcgcatacggactacaaaagatgaggaattcattcgaaaatttgccctttttgatgaacaacatcgggaagagatgcgaaaagaacggcggaggattcaagagcaactgaggcggcttaagaggaaccaggaaaaggagaagcttaagggtcctcctgagaagaagcccaagaaaatgaaggagcgtcctgacctaaaactgaaatgtggggcatgtggtgccattggacacatgaggactaacaaattctgccccctctattatcaaacaaatgcgccaccttccaaccctgttgccatgacagaagaacaggaggaggagttggaaaagacagtcattcataatgataatgaagaacttatcaaggttgaagggaccaaaattgtcttggggaaacagctaattgagagtgcggatgaggttcgcagaaaatctctggttctcaagtttcctaaacagcagcttcctccaaagaagaaacggcgagttggaaccactgttcactgtgactatttgaatagacctcataagtccatccaccggcgccgcacagaccctatggtgacgctgtcgtccatcttggagtctatcatcaatgacatgagagatcttccaaatacataccctttccacactccagtcaatgcaaaggttgtaaaggactactacaaaatcatcactcggccaatggacctacaaacactccgcgaaaacgtgcgtaaacgcctctacccatctcgggaagagttcagagagcatctggagctaattgtgaaaaatagtgcaacctacaatgggccaaaacactcattgactcagatctctcaatccatgctggatctctgtgatgaaaaactcaaagagaaagaagacaaattagctcgcttagagaaagctatcaaccccttgctggatgatgatgaccaagtggcgttttctttcattctggacaacattgtcacccagaaaatgatggcagttccagattcttggccatttcatcacccagttaataagaaatttgttccagattattacaaagtgattgtcaatccaatggatttagagaccatacgtaagaacatctccaagcacaagtatcagagtcgggagagctttctggatgatgtaaaccttattctggccaacagtgttaagtataatggacctgagagtcagtatactaagactgcccaggagattgtgaacgtctgttaccagacattgactgagtatgatgaacatttgactcaacttgagaaggatatttgtactgctaaagaagcagctttggaggaagcagaattagaaagcctggacccaatgaccccagggccctacacgcctcagcctcctgatttgtatgataccaacacatccctcagtatgtctcgagatgcctctgtatttcaagatgagagcaatatgtctgtcttggatattcccagtgccactccagaaaagcaggtaacacagatgcgccagggccgaggtaggctgggcgaggaagactctgatgtagatattgaagggtatgatgatgaggaggaggatgggaaacctaagactccagccccagaaggtgaagatggagatggtgatcttgcagatgaagaggaaggaactgtacaacagcctcaagccagtgtcctgtatgaggatttgcttatgtctgaaggagaagatgatgaggaagatgctgggagtgatgaagaaggagacaatcctttctctgctatccagctgagtgaaagtggaagtgactctgatgtgggatctggtggaataagacccaaacaaccccgcatgcttcaggagaacacaaggatggacatggaaaatgaagaaagcatgatgtcctatgagggagacggtggggaggcttcccatggtttggaggatagcaacatcagttatgggagctatgaggagcctgatcccaagtcgaacacccaagacacaagcttcagcagcatcggtgggtatgaggtatcagaggaggaagaagatgaggaggaggaagagcagcgctctgggccgagcgtactaagccaggtccacctgtcagaggacgaggaggacagtgaggatttccactccattgctggggacagtgacttggactctgatgaatgaggcttcctttgggcctccttggtcagccttccctgttctccagcctaggtggttcacctttccccaatttgttcatatttgtacagtatctgatcctgaaatcatgaaattaactaacaccttagcctttttaaaagtagtaagtaaatgataataaatcacctctcctaatcttcctggggcaatgtcaccctttgatttaaaacaaagcaaccccctttcccctaccactacggaaaagagcaagctcatttttccgtgtcctcctttatttaactccatttattgcttttggtataatttttccctggggaaggaggggaaattatgaaagaactagtaactttatgtcctcttgatgtattaggaaatttccggccaggcgtggtggctcacacctgtaatctcagcactctgggaggccgaggcgggcagatcacctgaggtcagaagttcgagaccagcttggccaacatggcgaaaccgcatctctactaaaaatacaaaaattagccaggctggagcagatgagagccctcctgctgggacagagaattgggttctagtggactctgtgctacacttaaacctgtgagacaaaccgcccattattttattatttaattatgcaatgcctagttcctaaatggattggaggcaaattaccgtaaattttgaaacagcctatatgtcagaaatgataatgttgccacctaaatgttttctgtcccccccaccctccccaggggaaatggtaggaaaatggtaagtttcttagggcaaagactgtgtcttctgtttcttttcatgcttaggatatggttctgtgcatagtaggtactcagtaaatgttcctagaatcataaaatcctcaacagatatgttactgagcatctgcttttcatgataagcactctatcagatccttgggatgcaaaggtaaataagacaaatcccttttacccaaagagctcaccatcaagttgggggagggaaagtggaattcaaaacatgttaataaatcatcatagtactgtgagataagtgcaattaagaagctagttataaagtataggggaaatagaggagtaatcatgtctgaaaagtcaggaaagtcttcctagaggtaatttttaagctgattgttttagaattagtagaagcttgccagatggaaaagtccaggcaaagtgtaacatgaatgggaaaggccacagtctagaaatggcagagtgtgttcctagtttgtttgtttgtttgtttgtacctgccttgttccaggaaggatttaatgtggtttatattccagtcctttaatgctggaagggctgagatgagactgaaagatgggcaggaagtatatcatcacaagctttgtgtttgatgttaatgtgtatgatttttatattatgggaaataagctcttagaggagtgatataatcaggtttgtgttttagaaatctgtgtaatgaatgaatgaagaaagaaattgaagaatcatgtaacatatgtgatcgcatttttgtaaaagaaccatgtgtgtttatatgtgtttatatatatacttgtgtatgcaaaggtaaaagtctgaaaggatatatgctaactgttcacaatgataaccccccaggaatgggattggaggggagggggcttctgtgtttgttatgtatgctgggtgggatattgtgcttttatttctatattgtttgaatttttttacagtatgtattatttttgtaataaaaattttaaaaaattcca

SEQ ID NO: 756 - DNA, 7405 bp, Homo sapiens
  source 1..7405: mol_type = genomic DNA
atcactgctgccgccatcatgtcagacacggacagcgacgaagattccgctggaggcggcccattttctttagcgggtttccttttcggcaacatcaatggagccgggcagctggagggggaaagcgtcttggatgatgaatgtaagaagcacttggcaggcttgggggctttggggctgggcagcctgatcactgaactcacggcaaatgaagaattgaccgggactgacggtgccttggtaaatgatgaagggtgggttaggagtacagaagatgctgtggactattcagacatcaatgaggtggcagaagatgaaagccgaagataccagcagacgatggggagcttgcagcccctttgccactcagattatgatgaagatgactatgatgctgattgtgaagacattgattgcaagttgatgcctcctccacctccacccccgggaccaatgaagaaggataaggaccaggattctattactggtgtgtctgaaaatggagaaggcatcatcttgccctccatcattgccccttcctctttggcctcagagaaagtggacttcagtagttcctctgactcagaatctgagatgggacctcaggaagcaacacaggcagaatctgaagatggaaagctgacccttccattggctgggattatgcagcatgatgccaccaagctgttgccaagtgtcacagaactttttccagaatttcgacctggaaaggtgttacgttttctacgtctttttggaccagggaagaatgtcccatctgtttggcggagtgctcggagaaagaggaagaagaagcaccgtgagctgatacaggaagagcagatccaggaggtggagtgctcagtagaatcagaagtcagccagaagtctttgtggaactacgactacgctccaccaccacctccagagcagtgtctctctgatgatgaaatcacgatgatggctcctgtggagtccaaattttcccaatcaactggagatatagataaagtgacagataccaaaccaagagtggctgagtggcgttatgggcctgcccgactgtggtatgatatgctgggtgtccctgaagatggcagtgggtttgactatggcttcaaactgagaaagacagaacatgaacctgtgataaaatctagaatgatagaggaatttaggaaacttgaggaaaacaatggcactgatcttctggctgatgaaaacttcctgatggtgacacagctgcattgggaggatgatatcatctgggatggggaggatgtcaaacacaaagggacaaaacctcagcgtgcaagcctggcaggctggcttccttctagcatgactaggaatgcgatggcttacaatgttcagcaaggttttgcagccactcttgatgatgacaaaccttggtactccatttttcccattgacaatgaggatctggtatatggacgctgggaggacaatatcatttgggatgctcaggccatgccccggctgttggaacctcctgttttgacacttgatcccaatgatgagaacctcattttggaaattcctgatgagaaggaagaggccacctctaactccccctccaaggagagtaagaaggaatcatctctgaagaagagtcgaattctcttagggaaaacaggagtcatcaaggaggaaccacagcagaacatgtctcagccagaagtgaaagatccatggaatctctccaatgatgagtattattatcccaagcaacagggtcttcgaggcacctttggagggaatattatccagcattcaattcctgctgtggaattacggcagcccttctttcccacccacatggggcccatcaaactccggcagttccatcgcccacctctgaaaaagtactcatttggtgcactttctcagccaggtccccactcagtccaacctttgctaaagcacatcaaaaaaaaggccaagatgagagaacaagagaggcaagcttcaggtggtggagagatgttttttatgcgcacacctcaggacctcacaggcaaagatggtgatcttattcttgcagaatatagtgaggaaaatggacccttaatgatgcaggttggcatggcaaccaagataaagaactattataaacggaaacctggaaaagatcctggagcaccagattgtaaatatggggaaactgtttactgccatacatctcctttcctgggttctctccatcctggccaattgctgcaagcatttgagaacaacctttttcgtgctccaatttatcttcataagatgccagaaactgatttcttgatcattcggacaagacagggttactatattcgggaattagtggatatttttgtggttggccagcagtgtcccttgtttgaagttcctgggcctaactccaaaagggccaatacgcatattcgagactttctacaggtttttatttaccgccttttctggaaaagtaaagatcggccacggaggatacgaatggaagatataaaaaaagcctttccttcccattcagaaagcagcatccggaagaggctaaagctctgcgctgacttcaaacgcacagggatggactcaaactggtgggtgcttaagtctgattttcgtttaccaacggaagaagagatcagagctatggtgtcaccagagcagtgctgtgcttattatagcatgatagctgcagagcaacgactgaaggatgctggctatggtgagaaatccttttttgctccagaagaagaaaatgaggaagatttccagatgaagattgatgatgaagttcgcactgccccttggaacaccacaagggccttcattgctgccatgaagggcaagtgtctgctagaggtgactggggtggcagatcccacggggtgtggtgaaggattctcctatgtgaagattccaaacaaaccaacacagcagaaggatgataaagaaccgcagccagtgaagaagacagtgacaggaacagatgcagaccttcgtcgcctttccctgaaaaatgccaagcaacttctacgtaaatttggtgtgcctgaggaagagattaaaaagttgtcccgctgggaagtgattgatgtggtgcgcacaatgtcaacagaacaggctcgttctggagaggggcccatgagtaaatttgcccgtggatcaaggttttctgtggctgagcatcaagagcgttacaaagaggaatgtcagcgcatctttgacctacagaacaaggttctgtcatcaactgaagtcttatcaactgacacagacagcagctcagctgaagatagtgactttgaagaaatgggaaagaacattgagaacatgttgcagaacaagaaaaccagctctcagctttcacgtgaacgggaggaacaggagcggaaggaactacagcgaatgctactggcagcaggctcagcagcatccggaaacaatcacagagatgatgacacagcttccgtgactagccttaactcttctgccactggacgctgtctcaagatttatcgcacgtttcgagatgaagaggggaaagagtatgttcgctgtgagacagtccgaaaaccagctgtcattgatgcctatgtgcgcatacggactacaaaagatgaggaattcattcgaaaatttgccctttttgatgaacaacatcgggaagagatgcgaaaagaacggcggaggattcaagagcaactgaggcggcttaagaggaaccaggaaaaggagaagcttaagggtcctcctgagaagaagcccaagaaaatgaaggagcgtcctgacctaaaactgaaatgtggggcatgtggtgccattggacacatgaggactaacaaattctgccccctctattatcaaacaaatgcgccaccttccaaccctgttgccatgacagaagaacaggaggaggagttggaaaagacagtcattcataatgataatgaagaacttatcaaggttgaagggaccaaaattgtcttggggaaacagctaattgagagtgcggatgaggttcgcagaaaatctctggttctcaagtttcctaaacagcagcttcctccaaagaagaaacggcgagttggaaccactgttcactgtgactatttgaatagacctcataagtccatccaccggcgccgcacagaccctatggtgacgctgtcgtccatcttggagtctatcatcaatgacatgagagatcttccaaatacataccctttccacactccagtcaatgcaaaggttgtaaaggactactacaaaatcatcactcggccaatggacctacaaacactccgcgaaaacgtgcgtaaacgcctctacccatctcgggaagagttcagagagcatctggagctaattgtgaaaaatagtgcaacctacaatgggccaaaacactcattgactcagatctctcaatccatgctggatctctgtgatgaaaaactcaaagagaaagaagacaaattagctcgcttagagaaagctatcaaccccttgctggatgatgatgaccaagtggcgttttctttcattctggacaacattgtcacccagaaaatgatggcagttccagattcttggccatttcatcacccagttaataagaaatttgttccagattattacaaagtgattgtcaatccaatggatttagagaccatacgtaagaacatctccaagcacaagtatcagagtcgggagagctttctggatgatgtaaaccttattctggccaacagtgttaagtataatggacctgagagtcagtatactaagactgcccaggagattgtgaacgtctgttaccagacattgactgagtatgatgaacatttgactcaacttgagaaggatatttgtactgctaaagaagcagctttggaggaagcagaattagaaagcctggacccaatgaccccagggccctacacgcctcagcctcctgatttgtatgataccaacacatccctcagtatgtctcgagatgcctctgtatttcaagatgagagcaatatgtctgtcttggatattcccagtgccactccagaaaagcaggtaacacaggaaggtgaagatggagatggtgatcttgcagatgaagaggaaggaactgtacaacagcctcaagccagtgtcctgtatgaggatttgcttatgtctgaaggagaagatgatgaggaagatgctgggagtgatgaagaaggagacaatcctttctctgctatccagctgagtgaaagtggaagtgactctgatgtgggatctggtggaataagacccaaacaaccccgcatgcttcaggagaacacaaggatggacatggaaaatgaagaaagcatgatgtcctatgagggagacggtggggaggcttcccatggtttggaggatagcaacatcagttatgggagctatgaggagcctgatcccaagtcgaacacccaagacacaagcttcagcagcatcggtgggtatgaggtatcagaggaggaagaagatgaggaggaggaagagcagcgctctgggccgagcgtactaagccaggtccacctgtcagaggacgaggaggacagtgaggatttccactccattgctggggacagtgacttggactctgatgaatgaggcttcctttgggcctccttggtcagccttccctgttctccagcctaggtggttcacctttccccaatttgttcatatttgtacagtatctgatcctgaaatcatgaaattaactaacaccttagcctttttaaaagtagtaagtaaatgataataaatcacctctcctaatcttcctggggcaatgtcaccctttgatttaaaacaaagcaaccccctttcccctaccactacggaaaagagcaagctcatttttccgtgtcctcctttatttaactccatttattgcttttggtataatttttccctggggaaggaggggaaattatgaaagaactagtaactttatgtcctcttgatgtattaggaaatttccggccaggcgtggtggctcacacctgtaatctcagcactctgggaggccgaggcgggcagatcacctgaggtcagaagttcgagaccagcttggccaacatggcgaaaccgcatctctactaaaaatacaaaaattagccaggctggagcagatgagagccctcctgctgggacagagaattgggttctagtggactctgtgctacacttaaacctgtgagacaaaccgcccattattttattatttaattatgcaatgcctagttcctaaatggattggaggcaaattaccgtaaattttgaaacagcctatatgtcagaaatgataatgttgccacctaaatgttttctgtcccccccaccctccccaggggaaatggtaggaaaatggtaagtttcttagggcaaagactgtgtcttctgtttcttttcatgcttaggatatggttctgtgcatagtaggtactcagtaaatgttcctagaatcataaaatcctcaacagatatgttactgagcatctgcttttcatgataagcactctatcagatccttgggatgcaaaggtaaataagacaaatcccttttacccaaagagctcaccatcaagttgggggagggaaagtggaattcaaaacatgttaataaatcatcatagtactgtgagataagtgcaattaagaagctagttataaagtataggggaaatagaggagtaatcatgtctgaaaagtcaggaaagtcttcctagaggtaatttttaagctgattgttttagaattagtagaagcttgccagatggaaaagtccaggcaaagtgtaacatgaatgggaaaggccacagtctagaaatggcagagtgtgttcctagtttgtttgtttgtttgtttgtacctgccttgttccaggaaggatttaatgtggtttatattccagtcctttaatgctggaagggctgagatgagactgaaagatgggcaggaagtatatcatcacaagctttgtgtttgatgttaatgtgtatgatttttatattatgggaaataagctcttagaggagtgatataatcaggtttgtgttttagaaatctgtgtaatgaatgaatgaagaaagaaattgaagaatcatgtaacatatgtgatcgcatttttgtaaaagaaccatgtgtgtttatatgtgtttatatatatacttgtgtatgcaaaggtaaaagtctgaaaggatatatgctaactgttcacaatgataaccccccaggaatgggattggaggggagggggcttctgtgtttgttatgtatgctgggtgggatattgtgcttttatttctatattgtttgaatttttttacagtatgtattatttttgtaataaaaattttaaaaaattcca

SEQ ID NO: 757 - DNA, 7402 bp, Homo sapiens
  source 1..7402: mol_type = genomic DNA
atcactgctgccgccatcatgtcagacacggacagcgacgaagattccgctggaggcggcccattttctttagcgggtttccttttcggcaacatcaatggagccgggcagctggagggggaaagcgtcttggatgatgaatgtaagaagcacttggcaggcttgggggctttggggctgggcagcctgatcactgaactcacggcaaatgaagaattgaccgggactgacggtgccttggtaaatgatgaagggtgggttaggagtacagaagatgctgtggactattcagacatcaatgaggtggcagaagatgaaagccgaagataccagcagacgatggggagcttgcagcccctttgccactcagattatgatgaagatgactatgatgctgattgtgaagacattgattgcaagttgatgcctcctccacctccacccccgggaccaatgaagaaggataaggaccaggattctattactggtgtgtctgaaaatggagaaggcatcatcttgccctccatcattgccccttcctctttggcctcagagaaagtggacttcagtagttcctctgactcagaatctgagatgggacctcaggaagcaacacaggcagaatctgaagatggaaagctgacccttccattggctgggattatgcagcatgatgccaccaagctgttgccaagtgtcacagaactttttccagaatttcgacctggaaaggtgttacgttttctacgtctttttggaccagggaagaatgtcccatctgtttggcggagtgctcggagaaagaggaagaagaagcaccgtgagctgatacaggaagagcagatccaggaggtggagtgctcagtagaatcagaagtcagccagaagtctttgtggaactacgactacgctccaccaccacctccagagcagtgtctctctgatgatgaaatcacgatgatggctcctgtggagtccaaattttcccaatcaactggagatatagataaagtgacagataccaaaccaagagtggctgagtggcgttatgggcctgcccgactgtggtatgatatgctgggtgtccctgaagatggcagtgggtttgactatggcttcaaactgagaaagacagaacatgaacctgtgataaaatctagaatgatagaggaatttaggaaacttgaggaaaacaatggcactgatcttctggctgatgaaaacttcctgatggtgacacagctgcattgggaggatgatatcatctgggatggggaggatgtcaaacacaaagggacaaaacctcagcgtgcaagcctggcaggctggcttccttctagcatgactaggaatgcgatggcttacaatgttcagcaaggttttgcagccactcttgatgatgacaaaccttggtactccatttttcccattgacaatgaggatctggtatatggacgctgggaggacaatatcatttgggatgctcaggccatgccccggctgttggaacctcctgttttgacacttgatcccaatgatgagaacctcattttggaaattcctgatgagaaggaagaggccacctctaactccccctccaaggagagtaagaaggaatcatctctgaagaagagtcgaattctcttagggaaaacaggagtcatcaaggaggaaccacagcagaacatgtctcagccagaagtgaaagatccatggaatctctccaatgatgagtattattatcccaagcaacagggtcttcgaggcacctttggagggaatattatccagcattcaattcctgctgtggaattacggcagcccttctttcccacccacatggggcccatcaaactccggcagttccatcgcccacctctgaaaaagtactcatttggtgcactttctcagccaggtccccactcagtccaacctttgctaaagcacatcaaaaaaaaggccaagatgagagaacaagagaggcaagcttcaggtggtggagagatgttttttatgcgcacacctcaggacctcacaggcaaagatggtgatcttattcttgcagaatatagtgaggaaaatggacccttaatgatgcaggttggcatggcaaccaagataaagaactattataaacggaaacctggaaaagatcctggagcaccagattgtaaatatggggaaactgtttactgccatacatctcctttcctgggttctctccatcctggccaattgctgcaagcatttgagaacaacctttttcgtgctccaatttatcttcataagatgccagaaactgatttcttgatcattcggacaagacagggttactatattcgggaattagtggatatttttgtggttggccagcagtgtcccttgtttgaagttcctgggcctaactccaaaagggccaatacgcatattcgagactttctacaggtttttatttaccgccttttctggaaaagtaaagatcggccacggaggatacgaatggaagatataaaaaaagcctttccttcccattcagaaagcagcatccggaagaggctaaagctctgcgctgacttcaaacgcacagggatggactcaaactggtgggtgcttaagtctgattttcgtttaccaacggaagaagagatcagagctatggtgtcaccagagcagtgctgtgcttattatagcatgatagctgcagagcaacgactgaaggatgctggctatggtgagaaatccttttttgctccagaagaagaaaatgaggaagatttccagatgaagattgatgatgaagttcgcactgccccttggaacaccacaagggccttcattgctgccatgaagggcaagtgtctgctagaggtgactggggtggcagatcccacggggtgtggtgaaggattctcctatgtgaagattccaaacaaaccaacacagcagaaggatgataaagaaccgcagccagtgaagaagacagtgacaggaacagatgcagaccttcgtcgcctttccctgaaaaatgccaagcaacttctacgtaaatttggtgtgcctgaggaagagattaaaaagttgtcccgctgggaagtgattgatgtggtgcgcacaatgtcaacagaacaggctcgttctggagaggggcccatgagtaaatttgcccgtggatcaaggttttctgtggctgagcatcaagagcgttacaaagaggaatgtcagcgcatctttgacctacagaacaaggttctgtcatcaactgaagtcttatcaactgacacagacagcagctcagctgaagatagtgactttgaagaaatgggaaagaacattgagaacatgttgcagaacaagaaaaccagctctcagctttcacgtgaacgggaggaacaggagcggaaggaactacagcgaatgctactggcaggctcagcagcatccggaaacaatcacagagatgatgacacagcttccgtgactagccttaactcttctgccactggacgctgtctcaagatttatcgcacgtttcgagatgaagaggggaaagagtatgttcgctgtgagacagtccgaaaaccagctgtcattgatgcctatgtgcgcatacggactacaaaagatgaggaattcattcgaaaatttgccctttttgatgaacaacatcgggaagagatgcgaaaagaacggcggaggattcaagagcaactgaggcggcttaagaggaaccaggaaaaggagaagcttaagggtcctcctgagaagaagcccaagaaaatgaaggagcgtcctgacctaaaactgaaatgtggggcatgtggtgccattggacacatgaggactaacaaattctgccccctctattatcaaacaaatgcgccaccttccaaccctgttgccatgacagaagaacaggaggaggagttggaaaagacagtcattcataatgataatgaagaacttatcaaggttgaagggaccaaaattgtcttggggaaacagctaattgagagtgcggatgaggttcgcagaaaatctctggttctcaagtttcctaaacagcagcttcctccaaagaagaaacggcgagttggaaccactgttcactgtgactatttgaatagacctcataagtccatccaccggcgccgcacagaccctatggtgacgctgtcgtccatcttggagtctatcatcaatgacatgagagatcttccaaatacataccctttccacactccagtcaatgcaaaggttgtaaaggactactacaaaatcatcactcggccaatggacctacaaacactccgcgaaaacgtgcgtaaacgcctctacccatctcgggaagagttcagagagcatctggagctaattgtgaaaaatagtgcaacctacaatgggccaaaacactcattgactcagatctctcaatccatgctggatctctgtgatgaaaaactcaaagagaaagaagacaaattagctcgcttagagaaagctatcaaccccttgctggatgatgatgaccaagtggcgttttctttcattctggacaacattgtcacccagaaaatgatggcagttccagattcttggccatttcatcacccagttaataagaaatttgttccagattattacaaagtgattgtcaatccaatggatttagagaccatacgtaagaacatctccaagcacaagtatcagagtcgggagagctttctggatgatgtaaaccttattctggccaacagtgttaagtataatggacctgagagtcagtatactaagactgcccaggagattgtgaacgtctgttaccagacattgactgagtatgatgaacatttgactcaacttgagaaggatatttgtactgctaaagaagcagctttggaggaagcagaattagaaagcctggacccaatgaccccagggccctacacgcctcagcctcctgatttgtatgataccaacacatccctcagtatgtctcgagatgcctctgtatttcaagatgagagcaatatgtctgtcttggatattcccagtgccactccagaaaagcaggtaacacaggaaggtgaagatggagatggtgatcttgcagatgaagaggaaggaactgtacaacagcctcaagccagtgtcctgtatgaggatttgcttatgtctgaaggagaagatgatgaggaagatgctgggagtgatgaagaaggagacaatcctttctctgctatccagctgagtgaaagtggaagtgactctgatgtgggatctggtggaataagacccaaacaaccccgcatgcttcaggagaacacaaggatggacatggaaaatgaagaaagcatgatgtcctatgagggagacggtggggaggcttcccatggtttggaggatagcaacatcagttatgggagctatgaggagcctgatcccaagtcgaacacccaagacacaagcttcagcagcatcggtgggtatgaggtatcagaggaggaagaagatgaggaggaggaagagcagcgctctgggccgagcgtactaagccaggtccacctgtcagaggacgaggaggacagtgaggatttccactccattgctggggacagtgacttggactctgatgaatgaggcttcctttgggcctccttggtcagccttccctgttctccagcctaggtggttcacctttccccaatttgttcatatttgtacagtatctgatcctgaaatcatgaaattaactaacaccttagcctttttaaaagtagtaagtaaatgataataaatcacctctcctaatcttcctggggcaatgtcaccctttgatttaaaacaaagcaaccccctttcccctaccactacggaaaagagcaagctcatttttccgtgtcctcctttatttaactccatttattgcttttggtataatttttccctggggaaggaggggaaattatgaaagaactagtaactttatgtcctcttgatgtattaggaaatttccggccaggcgtggtggctcacacctgtaatctcagcactctgggaggccgaggcgggcagatcacctgaggtcagaagttcgagaccagcttggccaacatggcgaaaccgcatctctactaaaaatacaaaaattagccaggctggagcagatgagagccctcctgctgggacagagaattgggttctagtggactctgtgctacacttaaacctgtgagacaaaccgcccattattttattatttaattatgcaatgcctagttcctaaatggattggaggcaaattaccgtaaattttgaaacagcctatatgtcagaaatgataatgttgccacctaaatgttttctgtcccccccaccctccccaggggaaatggtaggaaaatggtaagtttcttagggcaaagactgtgtcttctgtttcttttcatgcttaggatatggttctgtgcatagtaggtactcagtaaatgttcctagaatcataaaatcctcaacagatatgttactgagcatctgcttttcatgataagcactctatcagatccttgggatgcaaaggtaaataagacaaatcccttttacccaaagagctcaccatcaagttgggggagggaaagtggaattcaaaacatgttaataaatcatcatagtactgtgagataagtgcaattaagaagctagttataaagtataggggaaatagaggagtaatcatgtctgaaaagtcaggaaagtcttcctagaggtaatttttaagctgattgttttagaattagtagaagcttgccagatggaaaagtccaggcaaagtgtaacatgaatgggaaaggccacagtctagaaatggcagagtgtgttcctagtttgtttgtttgtttgtttgtacctgccttgttccaggaaggatttaatgtggtttatattccagtcctttaatgctggaagggctgagatgagactgaaagatgggcaggaagtatatcatcacaagctttgtgtttgatgttaatgtgtatgatttttatattatgggaaataagctcttagaggagtgatataatcaggtttgtgttttagaaatctgtgtaatgaatgaatgaagaaagaaattgaagaatcatgtaacatatgtgatcgcatttttgtaaaagaaccatgtgtgtttatatgtgtttatatatatacttgtgtatgcaaaggtaaaagtctgaaaggatatatgctaactgttcacaatgataaccccccaggaatgggattggaggggagggggcttctgtgtttgttatgtatgctgggtgggatattgtgcttttatttctatattgtttgaatttttttacagtatgtattatttttgtaataaaaattttaaaaaattcca

SEQ ID NO: 758 - DNA, 6199 bp, Homo sapiens
  source 1..6199: mol_type = genomic DNA
atcactgctgccgccatcatgtcagacacggacagcgacgaagattccgctggaggcggcccattttctttagcgggtttccttttcggcaacatcaatggagccgggcagctggagggggaaagcgtcttggatgatgaatgtaagaagcacttggcaggcttgggggctttggggctgggcagcctgatcactgaactcacggcaaatgaagaattgaccgggactgacggtgccttggtaaatgatgaagggtgggttaggagtacagaagatgctgtggactattcagacatcaatgaggtggcagaagatgaaagccgaagataccagcagacgatggggagcttgcagcccctttgccactcagattatgatgaagatgactatgatgctgattgtgaagacattgattgcaagttgatgcctcctccacctccacccccgggaccaatgaagaaggataaggaccaggattctattactggtgtgtctgaaaatggagaaggcatcatcttgccctccatcattgccccttcctctttggcctcagagaaagtggacttcagtagttcctctgactcagaatctgagatgggacctcaggaagcaacacaggcagaatctgaagatggaaagctgacccttccattggctgggattatgcagcatgatgccaccaagctgttgccaagtgtcacagaactttttccagaatttcgacctggaaaggtgttacgttttctacgtctttttggaccagggaagaatgtcccatctgtttggcggagtgctcggagaaagaggaagaagaagcaccgtgagctgatacaggaagagcagatccaggaggtggagtgctcagtagaatcagaagtcagccagaagtctttgtggaactacgactacgctccaccaccacctccagagcagtgtctctctgatgatgaaatcacgatgatggctcctgtggagtccaaattttcccaatcaactggagatatagataaagtgacagataccaaaccaagagtggctgagtggcgttatgggcctgcccgactgtggtatgatatgctgggtgtccctgaagatggcagtgggtttgactatggcttcaaactgagaaagacagaacatgaacctgtgataaaatctagaatgatagaggaatttaggaaacttgaggaaaacaatggcactgatcttctggctgatgaaaacttcctgatggtgacacagctgcattgggaggatgatatcatctgggatggggaggatgtcaaacacaaagggacaaaacctcagcgtgcaagcctggcaggctggcttccttctagcatgactaggaatgcgatggcttacaatgttcagcaaggttttgcagccactcttgatgatgacaaaccttggtactccatttttcccattgacaatgaggatctggtatatggacgctgggaggacaatatcatttgggatgctcaggccatgccccggctgttggaacctcctgttttgacacttgatcccaatgatgagaacctcattttggaaattcctgatgagaaggaagaggccacctctaactccccctccaaggagagtaagaaggaatcatctctgaagaagagtcgaattctcttagggaaaacaggagtcatcaaggaggaaccacagcagaacatgtctcagccagaagtgaaagatccatggaatctctccaatgatgagtattattatcccaagcaacagggtcttcgaggcacctttggagggaatattatccagcattcaattcctgctgtggaattacggcagcccttctttcccacccacatggggcccatcaaactccggcagttccatcgcccacctctgaaaaagtactcatttggtgcactttctcagccaggtccccactcagtccaacctttgctaaagcacatcaaaaaaaaggccaagatgagagaacaagagaggcaagcttcaggtggtggagagatgttttttatgcgcacacctcaggacctcacaggcaaagatggtgatcttattcttgcagaatatagtgaggaaaatggacccttaatgatgcaggttggcatggcaaccaagataaagaactattataaacggaaacctggaaaagatcctggagcaccagattgtaaatatggggaaactgtttactgccatacatctcctttcctgggttctctccatcctggccaattgctgcaagcatttgagaacaacctttttcgtgctccaatttatcttcataagatgccagaaactgatttcttgatcattcggacaagacagggttactatattcgggaattagtggatatttttgtggttggccagcagtgtcccttgtttgaagttcctgggcctaactccaaaagggccaatacgcatattcgagactttctacaggtttttatttaccgccttttctggaaaagtaaagatcggccacggaggatacgaatggaagatataaaaaaagcctttccttcccattcagaaagcagcatccggaagaggctaaagctctgcgctgacttcaaacgcacagggatggactcaaactggtgggtgcttaagtctgattttcgtttaccaacggaagaagagatcagagctatggtgtcaccagagcagtgctgtgcttattatagcatgatagctgcagagcaacgactgaaggatgctggctatggtgagaaatccttttttgctccagaagaagaaaatgaggaagatttccagatgaagattgatgatgaagttcgcactgccccttggaacaccacaagggccttcattgctgccatgaagggcaagtgtctgctagaggtgactggggtggcagatcccacggggtgtggtgaaggattctcctatgtgaagattccaaacaaaccaacacagcagaaggatgataaagaaccgcagccagtgaagaagacagtgacaggaacagatgcagaccttcgtcgcctttccctgaaaaatgccaagcaacttctacgtaaatttggtgtgcctgaggaagagattaaaaagttgtcccgctgggaagtgattgatgtggtgcgcacaatgtcaacagaacaggctcgttctggagaggggcccatgagtaaatttgcccgtggatcaaggttttctgtggctgagcatcaagagcgttacaaagaggaatgtcagcgcatctttgacctacagaacaaggttctgtcatcaactgaagtcttatcaactgacacagacagcagctcagctgaagatagtgactttgaagaaatgggaaagaacattgagaacatgttgcagaacaagaaaaccagctctcagctttcacgtgaacgggaggaacaggagcggaaggaactacagcgaatgctactggcagcaggctcagcagcatccggaaacaatcacagagatgatgacacagcttccgtgactagccttaactcttctgccactggacgctgtctcaagatttatcgcacgtttcgagatgaagaggggaaagagtatgttcgctgtgagacagtccgaaaaccagctgtcattgatgcctatgtgcgcatacggactacaaaagatgaggaattcattcgaaaatttgccctttttgatgaacaacatcgggaagagatgcgaaaagaacggcggaggattcaagagcaactgaggcggcttaagaggaaccaggaaaaggagaagcttaagggtcctcctgagaagaagcccaagaaaatgaaggagcgtcctgacctaaaactgaaatgtggggcatgtggtgccattggacacatgaggactaacaaattctgccccctctattatcaaacaaatgcgccaccttccaaccctgttgccatgacagaagaacaggaggaggagttggaaaagacagtcattcataatgataatgaagaacttatcaaggttgaagggaccaaaattgtcttggggaaacagctaattgagagtgcggatgaggttcgcagaaaatctctggttctcaagtttcctaaacagcagcttcctccaaagaagaaacggcgagttggaaccactgttcactgtgactatttgaatagacctcataagtccatccaccggcgccgcacagaccctatggtgacgctgtcgtccatcttggagtctatcatcaatgacatgagagatcttccaaatacataccctttccacactccagtcaatgcaaaggttgtaaaggactactacaaaatcatcactcggccaatggacctacaaacactccgcgaaaacgtgcgtaaacgcctctacccatctcgggaagagttcagagagcatctggagctaattgtgaaaaatagtgcaacctacaatgggccaaaacactcattgactcagatctctcaatccatgctggatctctgtgatgaaaaactcaaagagaaagaagacaaattagctcgcttagagaaagctatcaaccccttgctggatgatgatgaccaagtggcgttttctttcattctggacaacattgtcacccagaaaatgatggcagttccagattcttggccatttcatcacccagttaataagaaatttgttccagattattacaaagtgattgtcaatccaatggatttagagaccatacgtaagaacatctccaagcacaagtatcagagtcgggagagctttctggatgatgtaaaccttattctggccaacagtgttaagtataatggacctgagagtcagtatactaagactgcccaggagattgtgaacgtctgttaccagacattgactgagtatgatgaacatttgactcaacttgagaaggatatttgtactgctaaagaagcagctttggaggaagcagaattagaaagcctggacccaatgaccccagggccctacacgcctcagcctcctgatttgtatgataccaacacatccctcagtatgtctcgagatgcctctgtatttcaagatgagagcaatatgtctgtcttggatattcccagtgccactccagaaaagcaggtaacacagatgcgccagggccgaggtaggctgggcgaggaagactctgatgtagatattgaagggtatgatgatgaggaggaggatgggaaacctaagactccagccccagaaggtgaagatggagatggtgatcttgcagatgaagaggaaggaactgtacaacagcctcaagccagtgtcctgtatgaggatttgcttatgtctgaaggagaagatgatgaggaagatgctgggagtgatgaagaaggagacaatcctttctctgctatccagctgagtgaaagtggaagtgactctgatgtgggatctggtggaataagacccaaacaaccccgcatgcttcaggagaacacaaggatggacatggaaaatgaagaaagcatgatgtcctatgagggagacggtggggaggcttcccatggtttggaggatagcaacatcagatggagtctccctctgttgcccaggctagagtgcagtggtgtgatctcggctcactgcaacctccacctcccgggttcaagcgattttcctgcttcagcctcctgagtaactgggattacaggcacgcatcaccacaccgggctgatttttgtaggctggagtgcagtggtacgatctcagctcactgcaacatccgcctcccgggttcaagcgattcttgtgcctcagcctcctcagtagctgggattacaggcgcctgccatcatgcccagctaatttttgtatttttagtagagacggagtttcgccatgttggccaggctggtttcaaactcctgacctcagaggatccgcccgccttggcctctcaaagtgctgggattacaggcgtgagccaccgcgcccagccaagacggggctttaccatgttggccaggctggtctagaactcttgacctcaagcgatccacctaccttgtcttcccaaagtgctgggattacaggcatgagccactgtgcctggccaagccacttgtttttataagcagcctgccagatgctgatagagaagtaagatatagttcctgattgcaaggaacttaaggtctagaatgagaggtagatatgtaaataaacaagtttaataaaaagtgatcattgcaataaatatttacaagaa

SEQ ID NO: 759 - DNA, 6196 bp, Homo sapiens
  source 1..6196: mol_type = genomic DNA
atcactgctgccgccatcatgtcagacacggacagcgacgaagattccgctggaggcggcccattttctttagcgggtttccttttcggcaacatcaatggagccgggcagctggagggggaaagcgtcttggatgatgaatgtaagaagcacttggcaggcttgggggctttggggctgggcagcctgatcactgaactcacggcaaatgaagaattgaccgggactgacggtgccttggtaaatgatgaagggtgggttaggagtacagaagatgctgtggactattcagacatcaatgaggtggcagaagatgaaagccgaagataccagcagacgatggggagcttgcagcccctttgccactcagattatgatgaagatgactatgatgctgattgtgaagacattgattgcaagttgatgcctcctccacctccacccccgggaccaatgaagaaggataaggaccaggattctattactggtgtgtctgaaaatggagaaggcatcatcttgccctccatcattgccccttcctctttggcctcagagaaagtggacttcagtagttcctctgactcagaatctgagatgggacctcaggaagcaacacaggcagaatctgaagatggaaagctgacccttccattggctgggattatgcagcatgatgccaccaagctgttgccaagtgtcacagaactttttccagaatttcgacctggaaaggtgttacgttttctacgtctttttggaccagggaagaatgtcccatctgtttggcggagtgctcggagaaagaggaagaagaagcaccgtgagctgatacaggaagagcagatccaggaggtggagtgctcagtagaatcagaagtcagccagaagtctttgtggaactacgactacgctccaccaccacctccagagcagtgtctctctgatgatgaaatcacgatgatggctcctgtggagtccaaattttcccaatcaactggagatatagataaagtgacagataccaaaccaagagtggctgagtggcgttatgggcctgcccgactgtggtatgatatgctgggtgtccctgaagatggcagtgggtttgactatggcttcaaactgagaaagacagaacatgaacctgtgataaaatctagaatgatagaggaatttaggaaacttgaggaaaacaatggcactgatcttctggctgatgaaaacttcctgatggtgacacagctgcattgggaggatgatatcatctgggatggggaggatgtcaaacacaaagggacaaaacctcagcgtgcaagcctggcaggctggcttccttctagcatgactaggaatgcgatggcttacaatgttcagcaaggttttgcagccactcttgatgatgacaaaccttggtactccatttttcccattgacaatgaggatctggtatatggacgctgggaggacaatatcatttgggatgctcaggccatgccccggctgttggaacctcctgttttgacacttgatcccaatgatgagaacctcattttggaaattcctgatgagaaggaagaggccacctctaactccccctccaaggagagtaagaaggaatcatctctgaagaagagtcgaattctcttagggaaaacaggagtcatcaaggaggaaccacagcagaacatgtctcagccagaagtgaaagatccatggaatctctccaatgatgagtattattatcccaagcaacagggtcttcgaggcacctttggagggaatattatccagcattcaattcctgctgtggaattacggcagcccttctttcccacccacatggggcccatcaaactccggcagttccatcgcccacctctgaaaaagtactcatttggtgcactttctcagccaggtccccactcagtccaacctttgctaaagcacatcaaaaaaaaggccaagatgagagaacaagagaggcaagcttcaggtggtggagagatgttttttatgcgcacacctcaggacctcacaggcaaagatggtgatcttattcttgcagaatatagtgaggaaaatggacccttaatgatgcaggttggcatggcaaccaagataaagaactattataaacggaaacctggaaaagatcctggagcaccagattgtaaatatggggaaactgtttactgccatacatctcctttcctgggttctctccatcctggccaattgctgcaagcatttgagaacaacctttttcgtgctccaatttatcttcataagatgccagaaactgatttcttgatcattcggacaagacagggttactatattcgggaattagtggatatttttgtggttggccagcagtgtcccttgtttgaagttcctgggcctaactccaaaagggccaatacgcatattcgagactttctacaggtttttatttaccgccttttctggaaaagtaaagatcggccacggaggatacgaatggaagatataaaaaaagcctttccttcccattcagaaagcagcatccggaagaggctaaagctctgcgctgacttcaaacgcacagggatggactcaaactggtgggtgcttaagtctgattttcgtttaccaacggaagaagagatcagagctatggtgtcaccagagcagtgctgtgcttattatagcatgatagctgcagagcaacgactgaaggatgctggctatggtgagaaatccttttttgctccagaagaagaaaatgaggaagatttccagatgaagattgatgatgaagttcgcactgccccttggaacaccacaagggccttcattgctgccatgaagggcaagtgtctgctagaggtgactggggtggcagatcccacggggtgtggtgaaggattctcctatgtgaagattccaaacaaaccaacacagcagaaggatgataaagaaccgcagccagtgaagaagacagtgacaggaacagatgcagaccttcgtcgcctttccctgaaaaatgccaagcaacttctacgtaaatttggtgtgcctgaggaagagattaaaaagttgtcccgctgggaagtgattgatgtggtgcgcacaatgtcaacagaacaggctcgttctggagaggggcccatgagtaaatttgcccgtggatcaaggttttctgtggctgagcatcaagagcgttacaaagaggaatgtcagcgcatctttgacctacagaacaaggttctgtcatcaactgaagtcttatcaactgacacagacagcagctcagctgaagatagtgactttgaagaaatgggaaagaacattgagaacatgttgcagaacaagaaaaccagctctcagctttcacgtgaacgggaggaacaggagcggaaggaactacagcgaatgctactggcaggctcagcagcatccggaaacaatcacagagatgatgacacagcttccgtgactagccttaactcttctgccactggacgctgtctcaagatttatcgcacgtttcgagatgaagaggggaaagagtatgttcgctgtgagacagtccgaaaaccagctgtcattgatgcctatgtgcgcatacggactacaaaagatgaggaattcattcgaaaatttgccctttttgatgaacaacatcgggaagagatgcgaaaagaacggcggaggattcaagagcaactgaggcggcttaagaggaaccaggaaaaggagaagcttaagggtcctcctgagaagaagcccaagaaaatgaaggagcgtcctgacctaaaactgaaatgtggggcatgtggtgccattggacacatgaggactaacaaattctgccccctctattatcaaacaaatgcgccaccttccaaccctgttgccatgacagaagaacaggaggaggagttggaaaagacagtcattcataatgataatgaagaacttatcaaggttgaagggaccaaaattgtcttggggaaacagctaattgagagtgcggatgaggttcgcagaaaatctctggttctcaagtttcctaaacagcagcttcctccaaagaagaaacggcgagttggaaccactgttcactgtgactatttgaatagacctcataagtccatccaccggcgccgcacagaccctatggtgacgctgtcgtccatcttggagtctatcatcaatgacatgagagatcttccaaatacataccctttccacactccagtcaatgcaaaggttgtaaaggactactacaaaatcatcactcggccaatggacctacaaacactccgcgaaaacgtgcgtaaacgcctctacccatctcgggaagagttcagagagcatctggagctaattgtgaaaaatagtgcaacctacaatgggccaaaacactcattgactcagatctctcaatccatgctggatctctgtgatgaaaaactcaaagagaaagaagacaaattagctcgcttagagaaagctatcaaccccttgctggatgatgatgaccaagtggcgttttctttcattctggacaacattgtcacccagaaaatgatggcagttccagattcttggccatttcatcacccagttaataagaaatttgttccagattattacaaagtgattgtcaatccaatggatttagagaccatacgtaagaacatctccaagcacaagtatcagagtcgggagagctttctggatgatgtaaaccttattctggccaacagtgttaagtataatggacctgagagtcagtatactaagactgcccaggagattgtgaacgtctgttaccagacattgactgagtatgatgaacatttgactcaacttgagaaggatatttgtactgctaaagaagcagctttggaggaagcagaattagaaagcctggacccaatgaccccagggccctacacgcctcagcctcctgatttgtatgataccaacacatccctcagtatgtctcgagatgcctctgtatttcaagatgagagcaatatgtctgtcttggatattcccagtgccactccagaaaagcaggtaacacagatgcgccagggccgaggtaggctgggcgaggaagactctgatgtagatattgaagggtatgatgatgaggaggaggatgggaaacctaagactccagccccagaaggtgaagatggagatggtgatcttgcagatgaagaggaaggaactgtacaacagcctcaagccagtgtcctgtatgaggatttgcttatgtctgaaggagaagatgatgaggaagatgctgggagtgatgaagaaggagacaatcctttctctgctatccagctgagtgaaagtggaagtgactctgatgtgggatctggtggaataagacccaaacaaccccgcatgcttcaggagaacacaaggatggacatggaaaatgaagaaagcatgatgtcctatgagggagacggtggggaggcttcccatggtttggaggatagcaacatcagatggagtctccctctgttgcccaggctagagtgcagtggtgtgatctcggctcactgcaacctccacctcccgggttcaagcgattttcctgcttcagcctcctgagtaactgggattacaggcacgcatcaccacaccgggctgatttttgtaggctggagtgcagtggtacgatctcagctcactgcaacatccgcctcccgggttcaagcgattcttgtgcctcagcctcctcagtagctgggattacaggcgcctgccatcatgcccagctaatttttgtatttttagtagagacggagtttcgccatgttggccaggctggtttcaaactcctgacctcagaggatccgcccgccttggcctctcaaagtgctgggattacaggcgtgagccaccgcgcccagccaagacggggctttaccatgttggccaggctggtctagaactcttgacctcaagcgatccacctaccttgtcttcccaaagtgctgggattacaggcatgagccactgtgcctggccaagccacttgtttttataagcagcctgccagatgctgatagagaagtaagatatagttcctgattgcaaggaacttaaggtctagaatgagaggtagatatgtaaataaacaagtttaataaaaagtgatcattgcaataaatatttacaagaa

SEQ ID NO: 760 - DNA, 7342 bp, Homo sapiens
  source 1..7342: mol_type = genomic DNA
atcactgctgccgccatcatgtcagacacggacagcgacgaagattccgctggaggcggcccattttctttagcgggtttccttttcggcaacatcaatggagccgggcagctggagggggaaagcgtcttggatgatgaatgtaagaagcacttggcaggcttgggggctttggggctgggcagcctgatcactgaactcacggcaaatgaagaattgaccgggactgacggtgccttggtaaatgatgaagggtgggttaggagtacagaagatgctgtggactattcagacatcaatgaggtggcagaagatgaaagccgaagataccagcagacgatggggagcttgcagcccctttgccactcagattatgatgaagatgactatgatgctgattgtgaagacattgattgcaagttgatgcctcctccacctccacccccgggaccaatgaagaaggataaggaccaggattctattactggtgagaaagtggacttcagtagttcctctgactcagaatctgagatgggacctcaggaagcaacacaggcagaatctgaagatggaaagctgacccttccattggctgggattatgcagcatgatgccaccaagctgttgccaagtgtcacagaactttttccagaatttcgacctggaaaggtgttacgttttctacgtctttttggaccagggaagaatgtcccatctgtttggcggagtgctcggagaaagaggaagaagaagcaccgtgagctgatacaggaagagcagatccaggaggtggagtgctcagtagaatcagaagtcagccagaagtctttgtggaactacgactacgctccaccaccacctccagagcagtgtctctctgatgatgaaatcacgatgatggctcctgtggagtccaaattttcccaatcaactggagatatagataaagtgacagataccaaaccaagagtggctgagtggcgttatgggcctgcccgactgtggtatgatatgctgggtgtccctgaagatggcagtgggtttgactatggcttcaaactgagaaagacagaacatgaacctgtgataaaatctagaatgatagaggaatttaggaaacttgaggaaaacaatggcactgatcttctggctgatgaaaacttcctgatggtgacacagctgcattgggaggatgatatcatctgggatggggaggatgtcaaacacaaagggacaaaacctcagcgtgcaagcctggcaggctggcttccttctagcatgactaggaatgcgatggcttacaatgttcagcaaggttttgcagccactcttgatgatgacaaaccttggtactccatttttcccattgacaatgaggatctggtatatggacgctgggaggacaatatcatttgggatgctcaggccatgccccggctgttggaacctcctgttttgacacttgatcccaatgatgagaacctcattttggaaattcctgatgagaaggaagaggccacctctaactccccctccaaggagagtaagaaggaatcatctctgaagaagagtcgaattctcttagggaaaacaggagtcatcaaggaggaaccacagcagaacatgtctcagccagaagtgaaagatccatggaatctctccaatgatgagtattattatcccaagcaacagggtcttcgaggcacctttggagggaatattatccagcattcaattcctgctgtggaattacggcagcccttctttcccacccacatggggcccatcaaactccggcagttccatcgcccacctctgaaaaagtactcatttggtgcactttctcagccaggtccccactcagtccaacctttgctaaagcacatcaaaaaaaaggccaagatgagagaacaagagaggcaagcttcaggtggtggagagatgttttttatgcgcacacctcaggacctcacaggcaaagatggtgatcttattcttgcagaatatagtgaggaaaatggacccttaatgatgcaggttggcatggcaaccaagataaagaactattataaacggaaacctggaaaagatcctggagcaccagattgtaaatatggggaaactgtttactgccatacatctcctttcctgggttctctccatcctggccaattgctgcaagcatttgagaacaacctttttcgtgctccaatttatcttcataagatgccagaaactgatttcttgatcattcggacaagacagggttactatattcgggaattagtggatatttttgtggttggccagcagtgtcccttgtttgaagttcctgggcctaactccaaaagggccaatacgcatattcgagactttctacaggtttttatttaccgccttttctggaaaagtaaagatcggccacggaggatacgaatggaagatataaaaaaagcctttccttcccattcagaaagcagcatccggaagaggctaaagctctgcgctgacttcaaacgcacagggatggactcaaactggtgggtgcttaagtctgattttcgtttaccaacggaagaagagatcagagctatggtgtcaccagagcagtgctgtgcttattatagcatgatagctgcagagcaacgactgaaggatgctggctatggtgagaaatccttttttgctccagaagaagaaaatgaggaagatttccagatgaagattgatgatgaagttcgcactgccccttggaacaccacaagggccttcattgctgccatgaagggcaagtgtctgctagaggtgactggggtggcagatcccacggggtgtggtgaaggattctcctatgtgaagattccaaacaaaccaacacagcagaaggatgataaagaaccgcagccagtgaagaagacagtgacaggaacagatgcagaccttcgtcgcctttccctgaaaaatgccaagcaacttctacgtaaatttggtgtgcctgaggaagagattaaaaagttgtcccgctgggaagtgattgatgtggtgcgcacaatgtcaacagaacaggctcgttctggagaggggcccatgagtaaatttgcccgtggatcaaggttttctgtggctgagcatcaagagcgttacaaagaggaatgtcagcgcatctttgacctacagaacaaggttctgtcatcaactgaagtcttatcaactgacacagacagcagctcagctgaagatagtgactttgaagaaatgggaaagaacattgagaacatgttgcagaacaagaaaaccagctctcagctttcacgtgaacgggaggaacaggagcggaaggaactacagcgaatgctactggcagcaggctcagcagcatccggaaacaatcacagagatgatgacacagcttccgtgactagccttaactcttctgccactggacgctgtctcaagatttatcgcacgtttcgagatgaagaggggaaagagtatgttcgctgtgagacagtccgaaaaccagctgtcattgatgcctatgtgcgcatacggactacaaaagatgaggaattcattcgaaaatttgccctttttgatgaacaacatcgggaagagatgcgaaaagaacggcggaggattcaagagcaactgaggcggcttaagaggaaccaggaaaaggagaagcttaagggtcctcctgagaagaagcccaagaaaatgaaggagcgtcctgacctaaaactgaaatgtggggcatgtggtgccattggacacatgaggactaacaaattctgccccctctattatcaaacaaatgcgccaccttccaaccctgttgccatgacagaagaacaggaggaggagttggaaaagacagtcattcataatgataatgaagaacttatcaaggttgaagggaccaaaattgtcttggggaaacagctaattgagagtgcggatgaggttcgcagaaaatctctggttctcaagtttcctaaacagcagcttcctccaaagaagaaacggcgagttggaaccactgttcactgtgactatttgaatagacctcataagtccatccaccggcgccgcacagaccctatggtgacgctgtcgtccatcttggagtctatcatcaatgacatgagagatcttccaaatacataccctttccacactccagtcaatgcaaaggttgtaaaggactactacaaaatcatcactcggccaatggacctacaaacactccgcgaaaacgtgcgtaaacgcctctacccatctcgggaagagttcagagagcatctggagctaattgtgaaaaatagtgcaacctacaatgggccaaaacactcattgactcagatctctcaatccatgctggatctctgtgatgaaaaactcaaagagaaagaagacaaattagctcgcttagagaaagctatcaaccccttgctggatgatgatgaccaagtggcgttttctttcattctggacaacattgtcacccagaaaatgatggcagttccagattcttggccatttcatcacccagttaataagaaatttgttccagattattacaaagtgattgtcaatccaatggatttagagaccatacgtaagaacatctccaagcacaagtatcagagtcgggagagctttctggatgatgtaaaccttattctggccaacagtgttaagtataatggacctgagagtcagtatactaagactgcccaggagattgtgaacgtctgttaccagacattgactgagtatgatgaacatttgactcaacttgagaaggatatttgtactgctaaagaagcagctttggaggaagcagaattagaaagcctggacccaatgaccccagggccctacacgcctcagcctcctgatttgtatgataccaacacatccctcagtatgtctcgagatgcctctgtatttcaagatgagagcaatatgtctgtcttggatattcccagtgccactccagaaaagcaggtaacacaggaaggtgaagatggagatggtgatcttgcagatgaagaggaaggaactgtacaacagcctcaagccagtgtcctgtatgaggatttgcttatgtctgaaggagaagatgatgaggaagatgctgggagtgatgaagaaggagacaatcctttctctgctatccagctgagtgaaagtggaagtgactctgatgtgggatctggtggaataagacccaaacaaccccgcatgcttcaggagaacacaaggatggacatggaaaatgaagaaagcatgatgtcctatgagggagacggtggggaggcttcccatggtttggaggatagcaacatcagttatgggagctatgaggagcctgatcccaagtcgaacacccaagacacaagcttcagcagcatcggtgggtatgaggtatcagaggaggaagaagatgaggaggaggaagagcagcgctctgggccgagcgtactaagccaggtccacctgtcagaggacgaggaggacagtgaggatttccactccattgctggggacagtgacttggactctgatgaatgaggcttcctttgggcctccttggtcagccttccctgttctccagcctaggtggttcacctttccccaatttgttcatatttgtacagtatctgatcctgaaatcatgaaattaactaacaccttagcctttttaaaagtagtaagtaaatgataataaatcacctctcctaatcttcctggggcaatgtcaccctttgatttaaaacaaagcaaccccctttcccctaccactacggaaaagagcaagctcatttttccgtgtcctcctttatttaactccatttattgcttttggtataatttttccctggggaaggaggggaaattatgaaagaactagtaactttatgtcctcttgatgtattaggaaatttccggccaggcgtggtggctcacacctgtaatctcagcactctgggaggccgaggcgggcagatcacctgaggtcagaagttcgagaccagcttggccaacatggcgaaaccgcatctctactaaaaatacaaaaattagccaggctggagcagatgagagccctcctgctgggacagagaattgggttctagtggactctgtgctacacttaaacctgtgagacaaaccgcccattattttattatttaattatgcaatgcctagttcctaaatggattggaggcaaattaccgtaaattttgaaacagcctatatgtcagaaatgataatgttgccacctaaatgttttctgtcccccccaccctccccaggggaaatggtaggaaaatggtaagtttcttagggcaaagactgtgtcttctgtttcttttcatgcttaggatatggttctgtgcatagtaggtactcagtaaatgttcctagaatcataaaatcctcaacagatatgttactgagcatctgcttttcatgataagcactctatcagatccttgggatgcaaaggtaaataagacaaatcccttttacccaaagagctcaccatcaagttgggggagggaaagtggaattcaaaacatgttaataaatcatcatagtactgtgagataagtgcaattaagaagctagttataaagtataggggaaatagaggagtaatcatgtctgaaaagtcaggaaagtcttcctagaggtaatttttaagctgattgttttagaattagtagaagcttgccagatggaaaagtccaggcaaagtgtaacatgaatgggaaaggccacagtctagaaatggcagagtgtgttcctagtttgtttgtttgtttgtttgtacctgccttgttccaggaaggatttaatgtggtttatattccagtcctttaatgctggaagggctgagatgagactgaaagatgggcaggaagtatatcatcacaagctttgtgtttgatgttaatgtgtatgatttttatattatgggaaataagctcttagaggagtgatataatcaggtttgtgttttagaaatctgtgtaatgaatgaatgaagaaagaaattgaagaatcatgtaacatatgtgatcgcatttttgtaaaagaaccatgtgtgtttatatgtgtttatatatatacttgtgtatgcaaaggtaaaagtctgaaaggatatatgctaactgttcacaatgataaccccccaggaatgggattggaggggagggggcttctgtgtttgttatgtatgctgggtgggatattgtgcttttatttctatattgtttgaatttttttacagtatgtattatttttgtaataaaaattttaaaaaattcca

SEQ ID NO: 761 - DNA, 7339 bp, Homo sapiens
  source 1..7339: mol_type = genomic DNA
atcactgctgccgccatcatgtcagacacggacagcgacgaagattccgctggaggcggcccattttctttagcgggtttccttttcggcaacatcaatggagccgggcagctggagggggaaagcgtcttggatgatgaatgtaagaagcacttggcaggcttgggggctttggggctgggcagcctgatcactgaactcacggcaaatgaagaattgaccgggactgacggtgccttggtaaatgatgaagggtgggttaggagtacagaagatgctgtggactattcagacatcaatgaggtggcagaagatgaaagccgaagataccagcagacgatggggagcttgcagcccctttgccactcagattatgatgaagatgactatgatgctgattgtgaagacattgattgcaagttgatgcctcctccacctccacccccgggaccaatgaagaaggataaggaccaggattctattactggtgagaaagtggacttcagtagttcctctgactcagaatctgagatgggacctcaggaagcaacacaggcagaatctgaagatggaaagctgacccttccattggctgggattatgcagcatgatgccaccaagctgttgccaagtgtcacagaactttttccagaatttcgacctggaaaggtgttacgttttctacgtctttttggaccagggaagaatgtcccatctgtttggcggagtgctcggagaaagaggaagaagaagcaccgtgagctgatacaggaagagcagatccaggaggtggagtgctcagtagaatcagaagtcagccagaagtctttgtggaactacgactacgctccaccaccacctccagagcagtgtctctctgatgatgaaatcacgatgatggctcctgtggagtccaaattttcccaatcaactggagatatagataaagtgacagataccaaaccaagagtggctgagtggcgttatgggcctgcccgactgtggtatgatatgctgggtgtccctgaagatggcagtgggtttgactatggcttcaaactgagaaagacagaacatgaacctgtgataaaatctagaatgatagaggaatttaggaaacttgaggaaaacaatggcactgatcttctggctgatgaaaacttcctgatggtgacacagctgcattgggaggatgatatcatctgggatggggaggatgtcaaacacaaagggacaaaacctcagcgtgcaagcctggcaggctggcttccttctagcatgactaggaatgcgatggcttacaatgttcagcaaggttttgcagccactcttgatgatgacaaaccttggtactccatttttcccattgacaatgaggatctggtatatggacgctgggaggacaatatcatttgggatgctcaggccatgccccggctgttggaacctcctgttttgacacttgatcccaatgatgagaacctcattttggaaattcctgatgagaaggaagaggccacctctaactccccctccaaggagagtaagaaggaatcatctctgaagaagagtcgaattctcttagggaaaacaggagtcatcaaggaggaaccacagcagaacatgtctcagccagaagtgaaagatccatggaatctctccaatgatgagtattattatcccaagcaacagggtcttcgaggcacctttggagggaatattatccagcattcaattcctgctgtggaattacggcagcccttctttcccacccacatggggcccatcaaactccggcagttccatcgcccacctctgaaaaagtactcatttggtgcactttctcagccaggtccccactcagtccaacctttgctaaagcacatcaaaaaaaaggccaagatgagagaacaagagaggcaagcttcaggtggtggagagatgttttttatgcgcacacctcaggacctcacaggcaaagatggtgatcttattcttgcagaatatagtgaggaaaatggacccttaatgatgcaggttggcatggcaaccaagataaagaactattataaacggaaacctggaaaagatcctggagcaccagattgtaaatatggggaaactgtttactgccatacatctcctttcctgggttctctccatcctggccaattgctgcaagcatttgagaacaacctttttcgtgctccaatttatcttcataagatgccagaaactgatttcttgatcattcggacaagacagggttactatattcgggaattagtggatatttttgtggttggccagcagtgtcccttgtttgaagttcctgggcctaactccaaaagggccaatacgcatattcgagactttctacaggtttttatttaccgccttttctggaaaagtaaagatcggccacggaggatacgaatggaagatataaaaaaagcctttccttcccattcagaaagcagcatccggaagaggctaaagctctgcgctgacttcaaacgcacagggatggactcaaactggtgggtgcttaagtctgattttcgtttaccaacggaagaagagatcagagctatggtgtcaccagagcagtgctgtgcttattatagcatgatagctgcagagcaacgactgaaggatgctggctatggtgagaaatccttttttgctccagaagaagaaaatgaggaagatttccagatgaagattgatgatgaagttcgcactgccccttggaacaccacaagggccttcattgctgccatgaagggcaagtgtctgctagaggtgactggggtggcagatcccacggggtgtggtgaaggattctcctatgtgaagattccaaacaaaccaacacagcagaaggatgataaagaaccgcagccagtgaagaagacagtgacaggaacagatgcagaccttcgtcgcctttccctgaaaaatgccaagcaacttctacgtaaatttggtgtgcctgaggaagagattaaaaagttgtcccgctgggaagtgattgatgtggtgcgcacaatgtcaacagaacaggctcgttctggagaggggcccatgagtaaatttgcccgtggatcaaggttttctgtggctgagcatcaagagcgttacaaagaggaatgtcagcgcatctttgacctacagaacaaggttctgtcatcaactgaagtcttatcaactgacacagacagcagctcagctgaagatagtgactttgaagaaatgggaaagaacattgagaacatgttgcagaacaagaaaaccagctctcagctttcacgtgaacgggaggaacaggagcggaaggaactacagcgaatgctactggcaggctcagcagcatccggaaacaatcacagagatgatgacacagcttccgtgactagccttaactcttctgccactggacgctgtctcaagatttatcgcacgtttcgagatgaagaggggaaagagtatgttcgctgtgagacagtccgaaaaccagctgtcattgatgcctatgtgcgcatacggactacaaaagatgaggaattcattcgaaaatttgccctttttgatgaacaacatcgggaagagatgcgaaaagaacggcggaggattcaagagcaactgaggcggcttaagaggaaccaggaaaaggagaagcttaagggtcctcctgagaagaagcccaagaaaatgaaggagcgtcctgacctaaaactgaaatgtggggcatgtggtgccattggacacatgaggactaacaaattctgccccctctattatcaaacaaatgcgccaccttccaaccctgttgccatgacagaagaacaggaggaggagttggaaaagacagtcattcataatgataatgaagaacttatcaaggttgaagggaccaaaattgtcttggggaaacagctaattgagagtgcggatgaggttcgcagaaaatctctggttctcaagtttcctaaacagcagcttcctccaaagaagaaacggcgagttggaaccactgttcactgtgactatttgaatagacctcataagtccatccaccggcgccgcacagaccctatggtgacgctgtcgtccatcttggagtctatcatcaatgacatgagagatcttccaaatacataccctttccacactccagtcaatgcaaaggttgtaaaggactactacaaaatcatcactcggccaatggacctacaaacactccgcgaaaacgtgcgtaaacgcctctacccatctcgggaagagttcagagagcatctggagctaattgtgaaaaatagtgcaacctacaatgggccaaaacactcattgactcagatctctcaatccatgctggatctctgtgatgaaaaactcaaagagaaagaagacaaattagctcgcttagagaaagctatcaaccccttgctggatgatgatgaccaagtggcgttttctttcattctggacaacattgtcacccagaaaatgatggcagttccagattcttggccatttcatcacccagttaataagaaatttgttccagattattacaaagtgattgtcaatccaatggatttagagaccatacgtaagaacatctccaagcacaagtatcagagtcgggagagctttctggatgatgtaaaccttattctggccaacagtgttaagtataatggacctgagagtcagtatactaagactgcccaggagattgtgaacgtctgttaccagacattgactgagtatgatgaacatttgactcaacttgagaaggatatttgtactgctaaagaagcagctttggaggaagcagaattagaaagcctggacccaatgaccccagggccctacacgcctcagcctcctgatttgtatgataccaacacatccctcagtatgtctcgagatgcctctgtatttcaagatgagagcaatatgtctgtcttggatattcccagtgccactccagaaaagcaggtaacacaggaaggtgaagatggagatggtgatcttgcagatgaagaggaaggaactgtacaacagcctcaagccagtgtcctgtatgaggatttgcttatgtctgaaggagaagatgatgaggaagatgctgggagtgatgaagaaggagacaatcctttctctgctatccagctgagtgaaagtggaagtgactctgatgtgggatctggtggaataagacccaaacaaccccgcatgcttcaggagaacacaaggatggacatggaaaatgaagaaagcatgatgtcctatgagggagacggtggggaggcttcccatggtttggaggatagcaacatcagttatgggagctatgaggagcctgatcccaagtcgaacacccaagacacaagcttcagcagcatcggtgggtatgaggtatcagaggaggaagaagatgaggaggaggaagagcagcgctctgggccgagcgtactaagccaggtccacctgtcagaggacgaggaggacagtgaggatttccactccattgctggggacagtgacttggactctgatgaatgaggcttcctttgggcctccttggtcagccttccctgttctccagcctaggtggttcacctttccccaatttgttcatatttgtacagtatctgatcctgaaatcatgaaattaactaacaccttagcctttttaaaagtagtaagtaaatgataataaatcacctctcctaatcttcctggggcaatgtcaccctttgatttaaaacaaagcaaccccctttcccctaccactacggaaaagagcaagctcatttttccgtgtcctcctttatttaactccatttattgcttttggtataatttttccctggggaaggaggggaaattatgaaagaactagtaactttatgtcctcttgatgtattaggaaatttccggccaggcgtggtggctcacacctgtaatctcagcactctgggaggccgaggcgggcagatcacctgaggtcagaagttcgagaccagcttggccaacatggcgaaaccgcatctctactaaaaatacaaaaattagccaggctggagcagatgagagccctcctgctgggacagagaattgggttctagtggactctgtgctacacttaaacctgtgagacaaaccgcccattattttattatttaattatgcaatgcctagttcctaaatggattggaggcaaattaccgtaaattttgaaacagcctatatgtcagaaatgataatgttgccacctaaatgttttctgtcccccccaccctccccaggggaaatggtaggaaaatggtaagtttcttagggcaaagactgtgtcttctgtttcttttcatgcttaggatatggttctgtgcatagtaggtactcagtaaatgttcctagaatcataaaatcctcaacagatatgttactgagcatctgcttttcatgataagcactctatcagatccttgggatgcaaaggtaaataagacaaatcccttttacccaaagagctcaccatcaagttgggggagggaaagtggaattcaaaacatgttaataaatcatcatagtactgtgagataagtgcaattaagaagctagttataaagtataggggaaatagaggagtaatcatgtctgaaaagtcaggaaagtcttcctagaggtaatttttaagctgattgttttagaattagtagaagcttgccagatggaaaagtccaggcaaagtgtaacatgaatgggaaaggccacagtctagaaatggcagagtgtgttcctagtttgtttgtttgtttgtttgtacctgccttgttccaggaaggatttaatgtggtttatattccagtcctttaatgctggaagggctgagatgagactgaaagatgggcaggaagtatatcatcacaagctttgtgtttgatgttaatgtgtatgatttttatattatgggaaataagctcttagaggagtgatataatcaggtttgtgttttagaaatctgtgtaatgaatgaatgaagaaagaaattgaagaatcatgtaacatatgtgatcgcatttttgtaaaagaaccatgtgtgtttatatgtgtttatatatatacttgtgtatgcaaaggtaaaagtctgaaaggatatatgctaactgttcacaatgataaccccccaggaatgggattggaggggagggggcttctgtgtttgttatgtatgctgggtgggatattgtgcttttatttctatattgtttgaatttttttacagtatgtattatttttgtaataaaaattttaaaaaattcca

SEQ ID NO: 762 - DNA, 6097 bp, Homo sapiens
  source 1..6097: mol_type = genomic DNA
atcactgctgccgccatcatgtcagacacggacagcgacgaagattccgctggaggcggcccattttctttagcgggtttccttttcggcaacatcaatggagccgggcagctggagggggaaagcgtcttggatgatgaatgtaagaagcacttggcaggcttgggggctttggggctgggcagcctgatcactgaactcacggcaaatgaagaattgaccgggactgacggtgccttggtaaatgatgaagggtgggttaggagtacagaagatgctgtggactattcagacatcaatgaggtggcagaagatgaaagccgaagataccagcagacgatggggagcttgcagcccctttgccactcagattatgatgaagatgactatgatgctgattgtgaagacattgattgcaagttgatgcctcctccacctccacccccgggaccaatgaagaaggataaggaccaggattctattactggtgtgtctgaaaatggagaaggcatcatcttgccctccatcattgccccttcctctttggcctcagagaaagtggacttcagtagttcctctgactcagaatctgagatgggacctcaggaagcaacacaggcagaatctgaagatggaaagctgacccttccattggctgggattatgcagcatgatgccaccaagctgttgccaagtgtcacagaactttttccagaatttcgacctggaaaggtgttacgttttctacgtctttttggaccagggaagaatgtcccatctgtttggcggagtgctcggagaaagaggaagaagaagcaccgtgagctgatacaggaagagcagatccaggaggtggagtgctcagtagaatcagaagtcagccagaagtctttgtggaactacgactacgctccaccaccacctccagagcagtgtctctctgatgatgaaatcacgatgatggctcctgtggagtccaaattttcccaatcaactggagatatagataaagtgacagataccaaaccaagagtggctgagtggcgttatgggcctgcccgactgtggtatgatatgctgggtgtccctgaagatggcagtgggtttgactatggcttcaaactgagaaagacagaacatgaacctgtgataaaatctagaatgatagaggaatttaggaaacttgaggaaaacaatggcactgatcttctggctgatgaaaacttcctgatggtgacacagctgcattgggaggatgatatcatctgggatggggaggatgtcaaacacaaagggacaaaacctcagcgtgcaagcctggcaggctggcttccttctagcatgactaggaatgcgatggcttacaatgttcagcaaggttttgcagccactcttgatgatgacaaaccttggtactccatttttcccattgacaatgaggatctggtatatggacgctgggaggacaatatcatttgggatgctcaggccatgccccggctgttggaacctcctgttttgacacttgatcccaatgatgagaacctcattttggaaattcctgatgagaaggaagaggccacctctaactccccctccaaggagagtaagaaggaatcatctctgaagaagagtcgaattctcttagggaaaacaggagtcatcaaggaggaaccacagcagaacatgtctcagccagaagtgaaagatccatggaatctctccaatgatgagtattattatcccaagcaacagggtcttcgaggcacctttggagggaatattatccagcattcaattcctgctgtggaattacggcagcccttctttcccacccacatggggcccatcaaactccggcagttccatcgcccacctctgaaaaagtactcatttggtgcactttctcagccaggtccccactcagtccaacctttgctaaagcacatcaaaaaaaaggccaagatgagagaacaagagaggcaagcttcaggtggtggagagatgttttttatgcgcacacctcaggacctcacaggcaaagatggtgatcttattcttgcagaatatagtgaggaaaatggacccttaatgatgcaggttggcatggcaaccaagataaagaactattataaacggaaacctggaaaagatcctggagcaccagattgtaaatatggggaaactgtttactgccatacatctcctttcctgggttctctccatcctggccaattgctgcaagcatttgagaacaacctttttcgtgctccaatttatcttcataagatgccagaaactgatttcttgatcattcggacaagacagggttactatattcgggaattagtggatatttttgtggttggccagcagtgtcccttgtttgaagttcctgggcctaactccaaaagggccaatacgcatattcgagactttctacaggtttttatttaccgccttttctggaaaagtaaagatcggccacggaggatacgaatggaagatataaaaaaagcctttccttcccattcagaaagcagcatccggaagaggctaaagctctgcgctgacttcaaacgcacagggatggactcaaactggtgggtgcttaagtctgattttcgtttaccaacggaagaagagatcagagctatggtgtcaccagagcagtgctgtgcttattatagcatgatagctgcagagcaacgactgaaggatgctggctatggtgagaaatccttttttgctccagaagaagaaaatgaggaagatttccagatgaagattgatgatgaagttcgcactgccccttggaacaccacaagggccttcattgctgccatgaagggcaagtgtctgctagaggtgactggggtggcagatcccacggggtgtggtgaaggattctcctatgtgaagattccaaacaaaccaacacagcagaaggatgataaagaaccgcagccagtgaagaagacagtgacaggaacagatgcagaccttcgtcgcctttccctgaaaaatgccaagcaacttctacgtaaatttggtgtgcctgaggaagagattaaaaagttgtcccgctgggaagtgattgatgtggtgcgcacaatgtcaacagaacaggctcgttctggagaggggcccatgagtaaatttgcccgtggatcaaggttttctgtggctgagcatcaagagcgttacaaagaggaatgtcagcgcatctttgacctacagaacaaggttctgtcatcaactgaagtcttatcaactgacacagacagcagctcagctgaagatagtgactttgaagaaatgggaaagaacattgagaacatgttgcagaacaagaaaaccagctctcagctttcacgtgaacgggaggaacaggagcggaaggaactacagcgaatgctactggcagcaggctcagcagcatccggaaacaatcacagagatgatgacacagcttccgtgactagccttaactcttctgccactggacgctgtctcaagatttatcgcacgtttcgagatgaagaggggaaagagtatgttcgctgtgagacagtccgaaaaccagctgtcattgatgcctatgtgcgcatacggactacaaaagatgaggaattcattcgaaaatttgccctttttgatgaacaacatcgggaagagatgcgaaaagaacggcggaggattcaagagcaactgaggcggcttaagaggaaccaggaaaaggagaagcttaagggtcctcctgagaagaagcccaagaaaatgaaggagcgtcctgacctaaaactgaaatgtggggcatgtggtgccattggacacatgaggactaacaaattctgccccctctattatcaaacaaatgcgccaccttccaaccctgttgccatgacagaagaacaggaggaggagttggaaaagacagtcattcataatgataatgaagaacttatcaaggttgaagggaccaaaattgtcttggggaaacagctaattgagagtgcggatgaggttcgcagaaaatctctggttctcaagtttcctaaacagcagcttcctccaaagaagaaacggcgagttggaaccactgttcactgtgactatttgaatagacctcataagtccatccaccggcgccgcacagaccctatggtgacgctgtcgtccatcttggagtctatcatcaatgacatgagagatcttccaaatacataccctttccacactccagtcaatgcaaaggttgtaaaggactactacaaaatcatcactcggccaatggacctacaaacactccgcgaaaacgtgcgtaaacgcctctacccatctcgggaagagttcagagagcatctggagctaattgtgaaaaatagtgcaacctacaatgggccaaaacactcattgactcagatctctcaatccatgctggatctctgtgatgaaaaactcaaagagaaagaagacaaattagctcgcttagagaaagctatcaaccccttgctggatgatgatgaccaagtggcgttttctttcattctggacaacattgtcacccagaaaatgatggcagttccagattcttggccatttcatcacccagttaataagaaatttgttccagattattacaaagtgattgtcaatccaatggatttagagaccatacgtaagaacatctccaagcacaagtatcagagtcgggagagctttctggatgatgtaaaccttattctggccaacagtgttaagtataatggacctgagagtcagtatactaagactgcccaggagattgtgaacgtctgttaccagacattgactgagtatgatgaacatttgactcaacttgagaaggatatttgtactgctaaagaagcagctttggaggaagcagaattagaaagcctggacccaatgaccccagggccctacacgcctcagcctcctgatttgtatgataccaacacatccctcagtatgtctcgagatgcctctgtatttcaagatgagagcaatatgtctgtcttggatattcccagtgccactccagaaaagcaggtaacacaggaaggtgaagatggagatggtgatcttgcagatgaagaggaaggaactgtacaacagcctcaagccagtgtcctgtatgaggatttgcttatgtctgaaggagaagatgatgaggaagatgctgggagtgatgaagaaggagacaatcctttctctgctatccagctgagtgaaagtggaagtgactctgatgtgggatctggtggaataagacccaaacaaccccgcatgcttcaggagaacacaaggatggacatggaaaatgaagaaagcatgatgtcctatgagggagacggtggggaggcttcccatggtttggaggatagcaacatcagatggagtctccctctgttgcccaggctagagtgcagtggtgtgatctcggctcactgcaacctccacctcccgggttcaagcgattttcctgcttcagcctcctgagtaactgggattacaggcacgcatcaccacaccgggctgatttttgtaggctggagtgcagtggtacgatctcagctcactgcaacatccgcctcccgggttcaagcgattcttgtgcctcagcctcctcagtagctgggattacaggcgcctgccatcatgcccagctaatttttgtatttttagtagagacggagtttcgccatgttggccaggctggtttcaaactcctgacctcagaggatccgcccgccttggcctctcaaagtgctgggattacaggcgtgagccaccgcgcccagccaagacggggctttaccatgttggccaggctggtctagaactcttgacctcaagcgatccacctaccttgtcttcccaaagtgctgggattacaggcatgagccactgtgcctggccaagccacttgtttttataagcagcctgccagatgctgatagagaagtaagatatagttcctgattgcaaggaacttaaggtctagaatgagaggtagatatgtaaataaacaagtttaataaaaagtgatcattgcaataaatatttacaagaa

SEQ ID NO: 763 - DNA, 6094 bp, Homo sapiens
  source 1..6094: mol_type = genomic DNA
atcactgctgccgccatcatgtcagacacggacagcgacgaagattccgctggaggcggcccattttctttagcgggtttccttttcggcaacatcaatggagccgggcagctggagggggaaagcgtcttggatgatgaatgtaagaagcacttggcaggcttgggggctttggggctgggcagcctgatcactgaactcacggcaaatgaagaattgaccgggactgacggtgccttggtaaatgatgaagggtgggttaggagtacagaagatgctgtggactattcagacatcaatgaggtggcagaagatgaaagccgaagataccagcagacgatggggagcttgcagcccctttgccactcagattatgatgaagatgactatgatgctgattgtgaagacattgattgcaagttgatgcctcctccacctccacccccgggaccaatgaagaaggataaggaccaggattctattactggtgtgtctgaaaatggagaaggcatcatcttgccctccatcattgccccttcctctttggcctcagagaaagtggacttcagtagttcctctgactcagaatctgagatgggacctcaggaagcaacacaggcagaatctgaagatggaaagctgacccttccattggctgggattatgcagcatgatgccaccaagctgttgccaagtgtcacagaactttttccagaatttcgacctggaaaggtgttacgttttctacgtctttttggaccagggaagaatgtcccatctgtttggcggagtgctcggagaaagaggaagaagaagcaccgtgagctgatacaggaagagcagatccaggaggtggagtgctcagtagaatcagaagtcagccagaagtctttgtggaactacgactacgctccaccaccacctccagagcagtgtctctctgatgatgaaatcacgatgatggctcctgtggagtccaaattttcccaatcaactggagatatagataaagtgacagataccaaaccaagagtggctgagtggcgttatgggcctgcccgactgtggtatgatatgctgggtgtccctgaagatggcagtgggtttgactatggcttcaaactgagaaagacagaacatgaacctgtgataaaatctagaatgatagaggaatttaggaaacttgaggaaaacaatggcactgatcttctggctgatgaaaacttcctgatggtgacacagctgcattgggaggatgatatcatctgggatggggaggatgtcaaacacaaagggacaaaacctcagcgtgcaagcctggcaggctggcttccttctagcatgactaggaatgcgatggcttacaatgttcagcaaggttttgcagccactcttgatgatgacaaaccttggtactccatttttcccattgacaatgaggatctggtatatggacgctgggaggacaatatcatttgggatgctcaggccatgccccggctgttggaacctcctgttttgacacttgatcccaatgatgagaacctcattttggaaattcctgatgagaaggaagaggccacctctaactccccctccaaggagagtaagaaggaatcatctctgaagaagagtcgaattctcttagggaaaacaggagtcatcaaggaggaaccacagcagaacatgtctcagccagaagtgaaagatccatggaatctctccaatgatgagtattattatcccaagcaacagggtcttcgaggcacctttggagggaatattatccagcattcaattcctgctgtggaattacggcagcccttctttcccacccacatggggcccatcaaactccggcagttccatcgcccacctctgaaaaagtactcatttggtgcactttctcagccaggtccccactcagtccaacctttgctaaagcacatcaaaaaaaaggccaagatgagagaacaagagaggcaagcttcaggtggtggagagatgttttttatgcgcacacctcaggacctcacaggcaaagatggtgatcttattcttgcagaatatagtgaggaaaatggacccttaatgatgcaggttggcatggcaaccaagataaagaactattataaacggaaacctggaaaagatcctggagcaccagattgtaaatatggggaaactgtttactgccatacatctcctttcctgggttctctccatcctggccaattgctgcaagcatttgagaacaacctttttcgtgctccaatttatcttcataagatgccagaaactgatttcttgatcattcggacaagacagggttactatattcgggaattagtggatatttttgtggttggccagcagtgtcccttgtttgaagttcctgggcctaactccaaaagggccaatacgcatattcgagactttctacaggtttttatttaccgccttttctggaaaagtaaagatcggccacggaggatacgaatggaagatataaaaaaagcctttccttcccattcagaaagcagcatccggaagaggctaaagctctgcgctgacttcaaacgcacagggatggactcaaactggtgggtgcttaagtctgattttcgtttaccaacggaagaagagatcagagctatggtgtcaccagagcagtgctgtgcttattatagcatgatagctgcagagcaacgactgaaggatgctggctatggtgagaaatccttttttgctccagaagaagaaaatgaggaagatttccagatgaagattgatgatgaagttcgcactgccccttggaacaccacaagggccttcattgctgccatgaagggcaagtgtctgctagaggtgactggggtggcagatcccacggggtgtggtgaaggattctcctatgtgaagattccaaacaaaccaacacagcagaaggatgataaagaaccgcagccagtgaagaagacagtgacaggaacagatgcagaccttcgtcgcctttccctgaaaaatgccaagcaacttctacgtaaatttggtgtgcctgaggaagagattaaaaagttgtcccgctgggaagtgattgatgtggtgcgcacaatgtcaacagaacaggctcgttctggagaggggcccatgagtaaatttgcccgtggatcaaggttttctgtggctgagcatcaagagcgttacaaagaggaatgtcagcgcatctttgacctacagaacaaggttctgtcatcaactgaagtcttatcaactgacacagacagcagctcagctgaagatagtgactttgaagaaatgggaaagaacattgagaacatgttgcagaacaagaaaaccagctctcagctttcacgtgaacgggaggaacaggagcggaaggaactacagcgaatgctactggcaggctcagcagcatccggaaacaatcacagagatgatgacacagcttccgtgactagccttaactcttctgccactggacgctgtctcaagatttatcgcacgtttcgagatgaagaggggaaagagtatgttcgctgtgagacagtccgaaaaccagctgtcattgatgcctatgtgcgcatacggactacaaaagatgaggaattcattcgaaaatttgccctttttgatgaacaacatcgggaagagatgcgaaaagaacggcggaggattcaagagcaactgaggcggcttaagaggaaccaggaaaaggagaagcttaagggtcctcctgagaagaagcccaagaaaatgaaggagcgtcctgacctaaaactgaaatgtggggcatgtggtgccattggacacatgaggactaacaaattctgccccctctattatcaaacaaatgcgccaccttccaaccctgttgccatgacagaagaacaggaggaggagttggaaaagacagtcattcataatgataatgaagaacttatcaaggttgaagggaccaaaattgtcttggggaaacagctaattgagagtgcggatgaggttcgcagaaaatctctggttctcaagtttcctaaacagcagcttcctccaaagaagaaacggcgagttggaaccactgttcactgtgactatttgaatagacctcataagtccatccaccggcgccgcacagaccctatggtgacgctgtcgtccatcttggagtctatcatcaatgacatgagagatcttccaaatacataccctttccacactccagtcaatgcaaaggttgtaaaggactactacaaaatcatcactcggccaatggacctacaaacactccgcgaaaacgtgcgtaaacgcctctacccatctcgggaagagttcagagagcatctggagctaattgtgaaaaatagtgcaacctacaatgggccaaaacactcattgactcagatctctcaatccatgctggatctctgtgatgaaaaactcaaagagaaagaagacaaattagctcgcttagagaaagctatcaaccccttgctggatgatgatgaccaagtggcgttttctttcattctggacaacattgtcacccagaaaatgatggcagttccagattcttggccatttcatcacccagttaataagaaatttgttccagattattacaaagtgattgtcaatccaatggatttagagaccatacgtaagaacatctccaagcacaagtatcagagtcgggagagctttctggatgatgtaaaccttattctggccaacagtgttaagtataatggacctgagagtcagtatactaagactgcccaggagattgtgaacgtctgttaccagacattgactgagtatgatgaacatttgactcaacttgagaaggatatttgtactgctaaagaagcagctttggaggaagcagaattagaaagcctggacccaatgaccccagggccctacacgcctcagcctcctgatttgtatgataccaacacatccctcagtatgtctcgagatgcctctgtatttcaagatgagagcaatatgtctgtcttggatattcccagtgccactccagaaaagcaggtaacacaggaaggtgaagatggagatggtgatcttgcagatgaagaggaaggaactgtacaacagcctcaagccagtgtcctgtatgaggatttgcttatgtctgaaggagaagatgatgaggaagatgctgggagtgatgaagaaggagacaatcctttctctgctatccagctgagtgaaagtggaagtgactctgatgtgggatctggtggaataagacccaaacaaccccgcatgcttcaggagaacacaaggatggacatggaaaatgaagaaagcatgatgtcctatgagggagacggtggggaggcttcccatggtttggaggatagcaacatcagatggagtctccctctgttgcccaggctagagtgcagtggtgtgatctcggctcactgcaacctccacctcccgggttcaagcgattttcctgcttcagcctcctgagtaactgggattacaggcacgcatcaccacaccgggctgatttttgtaggctggagtgcagtggtacgatctcagctcactgcaacatccgcctcccgggttcaagcgattcttgtgcctcagcctcctcagtagctgggattacaggcgcctgccatcatgcccagctaatttttgtatttttagtagagacggagtttcgccatgttggccaggctggtttcaaactcctgacctcagaggatccgcccgccttggcctctcaaagtgctgggattacaggcgtgagccaccgcgcccagccaagacggggctttaccatgttggccaggctggtctagaactcttgacctcaagcgatccacctaccttgtcttcccaaagtgctgggattacaggcatgagccactgtgcctggccaagccacttgtttttataagcagcctgccagatgctgatagagaagtaagatatagttcctgattgcaaggaacttaaggtctagaatgagaggtagatatgtaaataaacaagtttaataaaaagtgatcattgcaataaatatttacaagaa

SEQ ID NO: 764 - DNA, 6034 bp, Homo sapiens
  source 1..6034: mol_type = genomic DNA
atcactgctgccgccatcatgtcagacacggacagcgacgaagattccgctggaggcggcccattttctttagcgggtttccttttcggcaacatcaatggagccgggcagctggagggggaaagcgtcttggatgatgaatgtaagaagcacttggcaggcttgggggctttggggctgggcagcctgatcactgaactcacggcaaatgaagaattgaccgggactgacggtgccttggtaaatgatgaagggtgggttaggagtacagaagatgctgtggactattcagacatcaatgaggtggcagaagatgaaagccgaagataccagcagacgatggggagcttgcagcccctttgccactcagattatgatgaagatgactatgatgctgattgtgaagacattgattgcaagttgatgcctcctccacctccacccccgggaccaatgaagaaggataaggaccaggattctattactggtgagaaagtggacttcagtagttcctctgactcagaatctgagatgggacctcaggaagcaacacaggcagaatctgaagatggaaagctgacccttccattggctgggattatgcagcatgatgccaccaagctgttgccaagtgtcacagaactttttccagaatttcgacctggaaaggtgttacgttttctacgtctttttggaccagggaagaatgtcccatctgtttggcggagtgctcggagaaagaggaagaagaagcaccgtgagctgatacaggaagagcagatccaggaggtggagtgctcagtagaatcagaagtcagccagaagtctttgtggaactacgactacgctccaccaccacctccagagcagtgtctctctgatgatgaaatcacgatgatggctcctgtggagtccaaattttcccaatcaactggagatatagataaagtgacagataccaaaccaagagtggctgagtggcgttatgggcctgcccgactgtggtatgatatgctgggtgtccctgaagatggcagtgggtttgactatggcttcaaactgagaaagacagaacatgaacctgtgataaaatctagaatgatagaggaatttaggaaacttgaggaaaacaatggcactgatcttctggctgatgaaaacttcctgatggtgacacagctgcattgggaggatgatatcatctgggatggggaggatgtcaaacacaaagggacaaaacctcagcgtgcaagcctggcaggctggcttccttctagcatgactaggaatgcgatggcttacaatgttcagcaaggttttgcagccactcttgatgatgacaaaccttggtactccatttttcccattgacaatgaggatctggtatatggacgctgggaggacaatatcatttgggatgctcaggccatgccccggctgttggaacctcctgttttgacacttgatcccaatgatgagaacctcattttggaaattcctgatgagaaggaagaggccacctctaactccccctccaaggagagtaagaaggaatcatctctgaagaagagtcgaattctcttagggaaaacaggagtcatcaaggaggaaccacagcagaacatgtctcagccagaagtgaaagatccatggaatctctccaatgatgagtattattatcccaagcaacagggtcttcgaggcacctttggagggaatattatccagcattcaattcctgctgtggaattacggcagcccttctttcccacccacatggggcccatcaaactccggcagttccatcgcccacctctgaaaaagtactcatttggtgcactttctcagccaggtccccactcagtccaacctttgctaaagcacatcaaaaaaaaggccaagatgagagaacaagagaggcaagcttcaggtggtggagagatgttttttatgcgcacacctcaggacctcacaggcaaagatggtgatcttattcttgcagaatatagtgaggaaaatggacccttaatgatgcaggttggcatggcaaccaagataaagaactattataaacggaaacctggaaaagatcctggagcaccagattgtaaatatggggaaactgtttactgccatacatctcctttcctgggttctctccatcctggccaattgctgcaagcatttgagaacaacctttttcgtgctccaatttatcttcataagatgccagaaactgatttcttgatcattcggacaagacagggttactatattcgggaattagtggatatttttgtggttggccagcagtgtcccttgtttgaagttcctgggcctaactccaaaagggccaatacgcatattcgagactttctacaggtttttatttaccgccttttctggaaaagtaaagatcggccacggaggatacgaatggaagatataaaaaaagcctttccttcccattcagaaagcagcatccggaagaggctaaagctctgcgctgacttcaaacgcacagggatggactcaaactggtgggtgcttaagtctgattttcgtttaccaacggaagaagagatcagagctatggtgtcaccagagcagtgctgtgcttattatagcatgatagctgcagagcaacgactgaaggatgctggctatggtgagaaatccttttttgctccagaagaagaaaatgaggaagatttccagatgaagattgatgatgaagttcgcactgccccttggaacaccacaagggccttcattgctgccatgaagggcaagtgtctgctagaggtgactggggtggcagatcccacggggtgtggtgaaggattctcctatgtgaagattccaaacaaaccaacacagcagaaggatgataaagaaccgcagccagtgaagaagacagtgacaggaacagatgcagaccttcgtcgcctttccctgaaaaatgccaagcaacttctacgtaaatttggtgtgcctgaggaagagattaaaaagttgtcccgctgggaagtgattgatgtggtgcgcacaatgtcaacagaacaggctcgttctggagaggggcccatgagtaaatttgcccgtggatcaaggttttctgtggctgagcatcaagagcgttacaaagaggaatgtcagcgcatctttgacctacagaacaaggttctgtcatcaactgaagtcttatcaactgacacagacagcagctcagctgaagatagtgactttgaagaaatgggaaagaacattgagaacatgttgcagaacaagaaaaccagctctcagctttcacgtgaacgggaggaacaggagcggaaggaactacagcgaatgctactggcagcaggctcagcagcatccggaaacaatcacagagatgatgacacagcttccgtgactagccttaactcttctgccactggacgctgtctcaagatttatcgcacgtttcgagatgaagaggggaaagagtatgttcgctgtgagacagtccgaaaaccagctgtcattgatgcctatgtgcgcatacggactacaaaagatgaggaattcattcgaaaatttgccctttttgatgaacaacatcgggaagagatgcgaaaagaacggcggaggattcaagagcaactgaggcggcttaagaggaaccaggaaaaggagaagcttaagggtcctcctgagaagaagcccaagaaaatgaaggagcgtcctgacctaaaactgaaatgtggggcatgtggtgccattggacacatgaggactaacaaattctgccccctctattatcaaacaaatgcgccaccttccaaccctgttgccatgacagaagaacaggaggaggagttggaaaagacagtcattcataatgataatgaagaacttatcaaggttgaagggaccaaaattgtcttggggaaacagctaattgagagtgcggatgaggttcgcagaaaatctctggttctcaagtttcctaaacagcagcttcctccaaagaagaaacggcgagttggaaccactgttcactgtgactatttgaatagacctcataagtccatccaccggcgccgcacagaccctatggtgacgctgtcgtccatcttggagtctatcatcaatgacatgagagatcttccaaatacataccctttccacactccagtcaatgcaaaggttgtaaaggactactacaaaatcatcactcggccaatggacctacaaacactccgcgaaaacgtgcgtaaacgcctctacccatctcgggaagagttcagagagcatctggagctaattgtgaaaaatagtgcaacctacaatgggccaaaacactcattgactcagatctctcaatccatgctggatctctgtgatgaaaaactcaaagagaaagaagacaaattagctcgcttagagaaagctatcaaccccttgctggatgatgatgaccaagtggcgttttctttcattctggacaacattgtcacccagaaaatgatggcagttccagattcttggccatttcatcacccagttaataagaaatttgttccagattattacaaagtgattgtcaatccaatggatttagagaccatacgtaagaacatctccaagcacaagtatcagagtcgggagagctttctggatgatgtaaaccttattctggccaacagtgttaagtataatggacctgagagtcagtatactaagactgcccaggagattgtgaacgtctgttaccagacattgactgagtatgatgaacatttgactcaacttgagaaggatatttgtactgctaaagaagcagctttggaggaagcagaattagaaagcctggacccaatgaccccagggccctacacgcctcagcctcctgatttgtatgataccaacacatccctcagtatgtctcgagatgcctctgtatttcaagatgagagcaatatgtctgtcttggatattcccagtgccactccagaaaagcaggtaacacaggaaggtgaagatggagatggtgatcttgcagatgaagaggaaggaactgtacaacagcctcaagccagtgtcctgtatgaggatttgcttatgtctgaaggagaagatgatgaggaagatgctgggagtgatgaagaaggagacaatcctttctctgctatccagctgagtgaaagtggaagtgactctgatgtgggatctggtggaataagacccaaacaaccccgcatgcttcaggagaacacaaggatggacatggaaaatgaagaaagcatgatgtcctatgagggagacggtggggaggcttcccatggtttggaggatagcaacatcagatggagtctccctctgttgcccaggctagagtgcagtggtgtgatctcggctcactgcaacctccacctcccgggttcaagcgattttcctgcttcagcctcctgagtaactgggattacaggcacgcatcaccacaccgggctgatttttgtaggctggagtgcagtggtacgatctcagctcactgcaacatccgcctcccgggttcaagcgattcttgtgcctcagcctcctcagtagctgggattacaggcgcctgccatcatgcccagctaatttttgtatttttagtagagacggagtttcgccatgttggccaggctggtttcaaactcctgacctcagaggatccgcccgccttggcctctcaaagtgctgggattacaggcgtgagccaccgcgcccagccaagacggggctttaccatgttggccaggctggtctagaactcttgacctcaagcgatccacctaccttgtcttcccaaagtgctgggattacaggcatgagccactgtgcctggccaagccacttgtttttataagcagcctgccagatgctgatagagaagtaagatatagttcctgattgcaaggaacttaaggtctagaatgagaggtagatatgtaaataaacaagtttaataaaaagtgatcattgcaataaatatttacaagaa

SEQ ID NO: 765 - DNA, 5421 bp, Homo sapiens
  source 1..5421: mol_type = genomic DNA
atcactgctgccgccatcatgtcagacacggacagcgacgaagattccgctggaggcggcccattttctttagcgggtttccttttcggcaacatcaatggagccgggcagctggagggggaaagcgtcttggatgatgaatgtaagaagcacttggcaggcttgggggctttggggctgggcagcctgatcactgaactcacggcaaatgaagaattgaccgggactgacggtgccttggtaaatgatgaagggtgggttaggagtacagaagatgctgtggactattcagacatcaatgaggtggcagaagatgaaagccgaagataccagcagacgatggggagcttgcagcccctttgccactcagattatgatgaagatgactatgatgctgattgtgaagacattgattgcaagttgatgcctcctccacctccacccccgggaccaatgaagaaggataaggaccaggattctattactggtgtgtctgaaaatggagaaggcatcatcttgccctccatcattgccccttcctctttggcctcagagaaagtggacttcagtagttcctctgactcagaatctgagatgggacctcaggaagcaacacaggcagaatctgaagatggaaagctgacccttccattggctgggattatgcagcatgatgccaccaagctgttgccaagtgtcacagaactttttccagaatttcgacctggaaaggtgttacgttttctacgtctttttggaccagggaagaatgtcccatctgtttggcggagtgctcggagaaagaggaagaagaagcaccgtgagctgatacaggaagagcagatccaggaggtggagtgctcagtagaatcagaagtcagccagaagtctttgtggaactacgactacgctccaccaccacctccagagcagtgtctctctgatgatgaaatcacgatgatggctcctgtggagtccaaattttcccaatcaactggagatatagataaagtgacagataccaaaccaagagtggctgagtggcgttatgggcctgcccgactgtggtatgatatgctgggtgtccctgaagatggcagtgggtttgactatggcttcaaactgagaaagacagaacatgaacctgtgataaaatctagaatgatagaggaatttaggaaacttgaggaaaacaatggcactgatcttctggctgatgaaaacttcctgatggtgacacagctgcattgggaggatgatatcatctgggatggggaggatgtcaaacacaaagggacaaaacctcagcgtgcaagcctggcaggctggcttccttctagcatgactaggaatgcgatggcttacaatgttcagcaaggttttgcagccactcttgatgatgacaaaccttggtactccatttttcccattgacaatgaggatctggtatatggacgctgggaggacaatatcatttgggatgctcaggccatgccccggctgttggaacctcctgttttgacacttgatcccaatgatgagaacctcattttggaaattcctgatgagaaggaagaggccacctctaactccccctccaaggagagtaagaaggaatcatctctgaagaagagtcgaattctcttagggaaaacaggagtcatcaaggaggaaccacagcagaacatgtctcagccagaagtgaaagatccatggaatctctccaatgatgagtattattatcccaagcaacagggtcttcgaggcacctttggagggaatattatccagcattcaattcctgctgtggaattacggcagcccttctttcccacccacatggggcccatcaaactccggcagttccatcgcccacctctgaaaaagtactcatttggtgcactttctcagccaggtccccactcagtccaacctttgctaaagcacatcaaaaaaaaggccaagatgagagaacaagagaggcaagcttcaggtggtggagagatgttttttatgcgcacacctcaggacctcacaggcaaagatggtgatcttattcttgcagaatatagtgaggaaaatggacccttaatgatgcaggttggcatggcaaccaagataaagaactattataaacggaaacctggaaaagatcctggagcaccagattgtaaatatggggaaactgtttactgccatacatctcctttcctgggttctctccatcctggccaattgctgcaagcatttgagaacaacctttttcgtgctccaatttatcttcataagatgccagaaactgatttcttgatcattcggacaagacagggttactatattcgggaattagtggatatttttgtggttggccagcagtgtcccttgtttgaagttcctgggcctaactccaaaagggccaatacgcatattcgagactttctacaggtttttatttaccgccttttctggaaaagtaaagatcggccacggaggatacgaatggaagatataaaaaaagcctttccttcccattcagaaagcagcatccggaagaggctaaagctctgcgctgacttcaaacgcacagggatggactcaaactggtgggtgcttaagtctgattttcgtttaccaacggaagaagagatcagagctatggtgtcaccagagcagtgctgtgcttattatagcatgatagctgcagagcaacgactgaaggatgctggctatggtgagaaatccttttttgctccagaagaagaaaatgaggaagatttccagatgaagattgatgatgaagttcgcactgccccttggaacaccacaagggccttcattgctgccatgaagggcaagtgtctgctagaggtgactggggtggcagatcccacggggtgtggtgaaggattctcctatgtgaagattccaaacaaaccaacacagcagaaggatgataaagaaccgcagccagtgaagaagacagtgacaggaacagatgcagaccttcgtcgcctttccctgaaaaatgccaagcaacttctacgtaaatttggtgtgcctgaggaagagattaaaaagttgtcccgctgggaagtgattgatgtggtgcgcacaatgtcaacagaacaggctcgttctggagaggggcccatgagtaaatttgcccgtggatcaaggttttctgtggctgagcatcaagagcgttacaaagaggaatgtcagcgcatctttgacctacagaacaaggttctgtcatcaactgaagtcttatcaactgacacagacagcagctcagctgaagatagtgactttgaagaaatgggaaagaacattgagaacatgttgcagaacaagaaaaccagctctcagctttcacgtgaacgggaggaacaggagcggaaggaactacagcgaatgctactggcagcaggctcagcagcatccggaaacaatcacagagatgatgacacagcttccgtgactagccttaactcttctgccactggacgctgtctcaagatttatcgcacgtttcgagatgaagaggggaaagagtatgttcgctgtgagacagtccgaaaaccagctgtcattgatgcctatgtgcgcatacggactacaaaagatgaggaattcattcgaaaatttgccctttttgatgaacaacatcgggaagagatgcgaaaagaacggcggaggattcaagagcaactgaggcggcttaagaggaaccaggaaaaggagaagcttaagggtcctcctgagaagaagcccaagaaaatgaaggagcgtcctgacctaaaactgaaatgtggggcatgtggtgccattggacacatgaggactaacaaattctgccccctctattatcaaacaaatgcgccaccttccaaccctgttgccatgacagaagaacaggaggaggagttggaaaagacagtcattcataatgataatgaagaacttatcaaggttgaagggaccaaaattgtcttggggaaacagctaattgagagtgcggatgaggttcgcagaaaatctctggttctcaagtttcctaaacagcagcttcctccaaagaagaaacggcgagttggaaccactgttcactgtgactatttgaatagacctcataagtccatccaccggcgccgcacagaccctatggtgacgctgtcgtccatcttggagtctatcatcaatgacatgagagatcttccaaatacataccctttccacactccagtcaatgcaaaggttgtaaaggactactacaaaatcatcactcggccaatggacctacaaacactccgcgaaaacgtgcgtaaacgcctctacccatctcgggaagagttcagagagcatctggagctaattgtgaaaaatagtgcaacctacaatgggccaaaacactcattgactcagatctctcaatccatgctggatctctgtgatgaaaaactcaaagagaaagaagacaaattagctcgcttagagaaagctatcaaccccttgctggatgatgatgaccaagtggcgttttctttcattctggacaacattgtcacccagaaaatgatggcagttccagattcttggccatttcatcacccagttaataagaaatttgttccagattattacaaagtgattgtcaatccaatggatttagagaccatacgtaagaacatctccaagcacaagtatcagagtcgggagagctttctggatgatgtaaaccttattctggccaacagtgttaagtataatggacctgagagtcagtatactaagactgcccaggagattgtgaacgtctgttaccagacattgactgagtatgatgaacatttgactcaacttgagaaggatatttgtactgctaaagaagcagctttggaggaagcagaattagaaagcctggacccaatgaccccagggccctacacgcctcagcctcctgatttgtatgataccaacacatccctcagtatgtctcgagatgcctctgtatttcaagatgagagcaatatgtctgtcttggatattcccagtgccactccagaaaagcaggtaacacaggaaggtgaagatggagatggtgatcttgcagatgaagaggaaggaactgtacaacagcctcaagccagtgtcctgtatgaggatttgcttatgtctgaaggagaagatgatgaggaagatgctgggagtgatgaagaaggagacaatcctttctctgctatccagctgagtgaaagtggaagtgactctgatgtgggatctggtggaataagacccaaacaaccccgcatgcttcaggagaacacaaggatggacatggaaaatgaagaaagcatgatgtcctatgagggagacggtggggaggcttcccatggtttggaggatagcaacatcaggtaa

SEQ ID NO: 766 - DNA, 8485 bp, Homo sapiens; identical to SEQ ID NO: 721
  source 1..8485: mol_type = genomic DNA

SEQ ID NO: 767 - DNA, 8419 bp, Homo sapiens; identical to SEQ ID NO: 723
  source 1..8419: mol_type = genomic DNA

SEQ ID NO: 768 - DNA, 1770 bp, Homo sapiens
  source 1..1770: mol_type = genomic DNA
ccctcgctggagcaacgcaagcaggaggcgggggagtcggaggaggtggcggcgctggagctcctcccggggaccagcgacccggggagcgagcacgtcgctccgcaccgctcttcctccagccgctgagccgtcccttctcgccatgtcccagagcaggcaccgcgccgaggccccgccgctggagcgcgaggacagtgggaccttcagtttggggaagatgataacagctaagccagggaaaacaccgattcaggtattacacgaatacggcatgaagaccaagaacatcccagtttatgaatgtgaaagatctgatgtgcaaatacacgtgcccactttcaccttcagagtaaccgttggtgacataacctgcacaggtgaaggtacaagtaagaagctggcgaaacatagagctgcagaggctgccataaacattttgaaagccaatgcaagtatttgctttgcagttcctgaccccttaatgcctgacccttccaagcaaccaaagaaccagcttaatcctattggttcattacaggaattggctattcatcatggctggagacttcctgaatataccctttcccaggagggaggacctgctcataagagagaatatactacaatttgcaggctagagtcatttatggaaactggaaagggggcatcaaaaaagcaagccaaaaggaatgctgctgagaaatttcttgccaaatttagtaatatttctccagagaaccacatttctttaacaaatgtagtaggacattctttaggatgtacttggcattccttgaggaattctcctggtgaaaagatcaacttactgaaaagaagcctccttagtattccaaatacagattacatccagctgcttagtgaaattgccaaggaacaaggttttaatataacatatttggatatagatgaactgagcgccaatggacaatatcaatgtcttgctgaactgtccaccagccccatcacagtctgtcatggctccggtatctcctgtggcaatgcacaaagtgatgcagctcacaatgctttgcagtatttaaagataatagcagaaagaaagtaaatctggagcaacttaaaaaatctttcagtagcacataaaaagttcccctctggccccttcccaagtaaaacttttaccgtagtgtttatgtcttgtttctaaatctcttcatagattccatcaacactccagatttaattatctcctcatagttgttattaagctctttttaatggcttcaactttgtatcagtatactgtatttataaactttgtaccacaagagagagtgtagcacccattttacagtgccatgcacatcagagaaagaaactgcatgtttgttgttgatgatgaaataaaaatgctagcgacagtctttcttactggtgcttaagctcttctttgcacaaagctttataaagggaattcaaaggaagccctttagaattagagtcttgagggacagcactaacaggcctttattaagtatgattgattgttaaatttcagggaacatgattggtctgctgtgtatttgaattcatgtaacaaagaactgttacgatgggattctgctcattttattaaaaagctactgacttgactgtcatcctgttcttgttagccattgtgaataagattttaatgttgataattctgttatttacatatctctaatttactttgaaattcaaaggtgaaaataaaaaatgatggcctaagtaaaatttacaaacata

SEQ ID NO: 769 - DNA, 8209 bp, Homo sapiens; identical to SEQ ID NO: 727
  source 1..8209: mol_type = genomic DNA

SEQ ID NO: 770 - DNA, 8305 bp, Homo sapiens; identical to SEQ ID NO: 726
  source 1..8305: mol_type = genomic DNA

SEQ ID NO: 771 - DNA, 1880 bp, Homo sapiens
  source 1..1880: mol_type = genomic DNA
ccctcgctggagcaacgcaagcaggaggcgggggagtcggaggaggtggcggcgctggagctcctcccggggaccagcgacccggggagcgagcacgtcgctccgcaccgctcttcctccagccgctgagccgtcccttctcgccatgtcccagagcaggcaccgcgccgaggccccgccgctggagcgcgaggacagtgggaccttcagtttggggaagatgataacagctaagccagggaaaacaccgattcaggtattacacgaatacggcatgaagaccaagaacatcccagtttatgaatgtgaaagatctgatgtgcaaatacacgtgcccactttcaccttcagagtaaccgttggtgacataacctgcacaggtgaaggtacaagtaagaagctggcgaaacatagagctgcagaggctgccataaacattttgaaagccaatgcaagtatttgataaaatgggaattactaagctgtaatcaggcctaaagtggcctgacttaatacagagactttctcacttctccatcacaattatttgggtagcttcggcatgcagcattctttgcagttcctgaccccttaatgcctgacccttccaagcaaccaaagaaccagcttaatcctattggttcattacaggaattggctattcatcatggctggagacttcctgaatataccctttcccaggagggaggacctgctcataagagagaatatactacaatttgcaggctagagtcatttatggaaactggaaagggggcatcaaaaaagcaagccaaaaggaatgctgctgagaaatttcttgccaaatttagtaatatttctccagagaaccacatttctttaacaaatgtagtaggacattctttaggatgtacttggcattccttgaggaattctcctggtgaaaagatcaacttactgaaaagaagcctccttagtattccaaatacagattacatccagctgcttagtgaaattgccaaggaacaaggttttaatataacatatttggatatagatgaactgagcgccaatggacaatatcaatgtcttgctgaactgtccaccagccccatcacagtctgtcatggctccggtatctcctgtggcaatgcacaaagtgatgcagctcacaatgctttgcagtatttaaagataatagcagaaagaaagtaaatctggagcaacttaaaaaatctttcagtagcacataaaaagttcccctctggccccttcccaagtaaaacttttaccgtagtgtttatgtcttgtttctaaatctcttcatagattccatcaacactccagatttaattatctcctcatagttgttattaagctctttttaatggcttcaactttgtatcagtatactgtatttataaactttgtaccacaagagagagtgtagcacccattttacagtgccatgcacatcagagaaagaaactgcatgtttgttgttgatgatgaaataaaaatgctagcgacagtctttcttactggtgcttaagctcttctttgcacaaagctttataaagggaattcaaaggaagccctttagaattagagtcttgagggacagcactaacaggcctttattaagtatgattgattgttaaatttcagggaacatgattggtctgctgtgtatttgaattcatgtaacaaagaactgttacgatgggattctgctcattttattaaaaagctactgacttgactgtcatcctgttcttgttagccattgtgaataagattttaatgttgataattctgttatttacatatctctaatttactttgaaattcaaaggtgaaaataaaaaatgatggcctaagtaaaatttacaaacata

SEQ ID NO: 772 - DNA, 1609 bp, Homo sapiens
  source 1..1609: mol_type = genomic DNA
tttggggaagatgataacagctaagccagggaaaacaccgattcaggtattacacgaatacggcatgaagaccaagaacatcccagtttatgaatgtgaaagatctgatgtgcaaatacacgtgcccactttcaccttcagagtaaccgttggtgacataacctgcacaggtgaaggtacaagtaagaagctggcgaaacatagagctgcagaggctgccataaacattttgaaagccaatgcaagtatttggtgagctaaatttctttgtattcagcagctcaaaaatatcatggctgagctttgcagttcctgaccccttaatgcctgacccttccaagcaaccaaagaaccagcttaatcctattggttcattacaggaattggctattcatcatggctggagacttcctgaatataccctttcccaggagggaggacctgctcataagagagaatatactacaatttgcaggctagagtcatttatggaaactggaaagggggcatcaaaaaagcaagccaaaaggaatgctgctgagaaatttcttgccaaatttagtaatatttctccagagaaccacatttctttaacaaatgtagtaggacattctttaggatgtacttggcattccttgaggaattctcctggtgaaaagatcaacttactgaaaagaagcctccttagtattccaaatacagattacatccagctgcttagtgaaattgccaaggaacaaggttttaatataacatatttggatatagatgaactgagcgccaatggacaatatcaatgtcttgctgaactgtccaccagccccatcacagtctgtcatggctccggtatctcctgtggcaatgcacaaagtgatgcagctcacaatgctttgcagtatttaaagataatagcagaaagaaagtaaatctggagcaacttaaaaaatctttcagtagcacataaaaagttcccctctggccccttcccaagtaaaacttttaccgtagtgtttatgtcttgtttctaaatctcttcatagattccatcaacactccagatttaattatctcctcatagttgttattaagctctttttaatggcttcaactttgtatcagtatactgtatttataaactttgtaccacaagagagagtgtagcacccattttacagtgccatgcacatcagagaaagaaactgcatgtttgttgttgatgatgaaataaaaatgctagcgacagtctttcttactggtgcttaagctcttctttgcacaaagctttataaagggaattcaaaggaagccctttagaattagagtcttgagggacagcactaacaggcctttattaagtatgattgattgttaaatttcagggaacatgattggtctgctgtgtatttgaattcatgtaacaaagaactgttacgatgggattctgctcattttattaaaaagctactgacttgactgtcatcctgttcttgttagccattgtgaataagattttaatgttgataattctgttatttacatatctctaatttactttgaaattcaaaggtgaaaataaaaaatgatggcctaagtaaaatttacaaacata

SEQ ID NO: 773 - DNA, 834 bp, Homo sapiens
  source 1..834: mol_type = genomic DNA
ccctcgctggagcaacgcaagcaggaggcgggggagtcggaggaggtggcggcgctggagctcctcccggggaccagcgacccggggagcgagcacgtcgctccgcaccgctcttcctccagccgctgagccgtcccttctcgccatgtcccagagcaggcaccgcgccgaggccccgccgctggagcgcgaggacagtgggaccttcagtttggggaagatgataacagctaagccagggaaaacaccgattcaggtattacacgaatacggcatgaagaccaagaacatcccagtttatgaatgtgaaagatctgatgtgcaaatacacgtgcccactttcaccttcagagtaaccgttggtgacataacctgcacaggtgaaggtacaagtaagaagctggcgaaacatagagctgcagaggctgccataaacattttgaaagccaatgcaagtatttgctttgcagttcctgaccccttaatgcctgacccttccaagcaaccaaagaaccagcttaatcctattggttcattacaggaattggctattcatcatggctggagacttcctgaatataccctttcccaggagggaggacctgctcataagagagaatatactacaatttgcaggctagagtcatttatggaaactgacaaatgtagtaggacattctttaggatgtacttggcattccttgaggaattctcctggtgaaaagatcaacttactgaaaagaagcctccttagtattccaaatacagattacatccagctgcttagtgaaattgccaaggaacaaggttttaatataacatatttggatatag

SEQ ID NO: 774 - DNA, 3551 bp, Homo sapiens
  source 1..3551: mol_type = genomic DNA
agcctctgtgcggtgggaccaacggacggacggacggacgcgcgcacctaccgaggcgcgggcgctgcagaggctcccagcccaagcctgagcctgagcccgccccgaggtccccgccccgcccgcctggctctctcgccgcggagccgccaagatgggggacaagaaagatgacaaggactcacccaagaagaacaagggcaaggagcgccgggacctggatgacctcaagaaggaggtggctatgacagagcacaagatgtcagtggaagaggtctgccggaaatacaacacagactgtgtgcagggtttgacccacagcaaagcccaggagatcctggcccgggatgggcctaacgcactcacgccaccgcctaccaccccagagtgggtcaagttttgccggcagctcttcgggggcttctccatcctgctgtggatcggggctatcctctgcttcctggcctacggtatccaggcgggcaccgaggacgacccctctggtgacaacctgtacctgggcatcgtgctggcggccgtggtgatcatcactggctgcttctcctactaccaggaggccaagagctccaagatcatggagtccttcaagaacatggtgccccagcaagccctggtgatccgggaaggtgagaagatgcaggtgaacgctgaggaggtggtggtcggggacctggtggagatcaagggtggagaccgagtgccagctgacctgcggatcatctcagcccacggctgcaaggtggacaactcctccctgactggcgaatccgagccccagactcgctctcccgactgcactcacgacaaccccttggagactcggaacatcaccttcttttccaccaactgtgtggaaggcacggctcggggcgtggtggtggccacgggcgaccgcactgtcatgggccgtatcgccaccctggcatcagggctggaggtgggcaagacgcccatcgccatcgagattgagcacttcatccagctcatcaccggcgtggctgtcttcctgggtgtctccttcttcatcctctccctcattctcggatacacctggcttgaggctgtcatcttcctcatcggcatcatcgtggccaatgtcccagagggtctgctggccactgtcactgtgtgtctgacgctgaccgccaagcgcatggcccggaagaactgcctggtgaagaacctggaggctgtagaaaccctgggctccacgtccaccatctgctcagataagacagggaccctcactcagaaccgcatgacagtcgcccacatgtggtttgacaaccagatccacgaggctgacaccactgaggaccagtcagggacctcatttgacaagagttcgcacacctgggtggccctgtctcacatcgctgggctctgcaatcgcgctgtcttcaagggtggtcaggacaacatccctgtgctcaagagggatgtggctggggatgcgtctgagtctgccctgctcaagtgcatcgagctgtcctctggctccgtgaagctgatgcgtgaacgcaacaagaaagtggctgagattcccttcaattccaccaacaaataccagctctccatccatgagaccgaggaccccaacgacaaccgatacctgctggtgatgaagggtgcccccgagcgcatcctggaccgctgctccaccatcctgctacagggcaaggagcagcctctggacgaggaaatgaaggaggccttccagaatgcctaccttgagctcggtggcctgggcgagcgcgtgcttggtttctgccattattacctgcccgaggagcagttccccaagggctttgccttcgactgtgatgacgtgaacttcaccacggacaacctctgctttgtgggcctcatgtccatgatcgacccaccccgggcagccgtccctgacgcggtgggcaagtgtcgcagcgcaggcatcaaggtcatcatggtcaccggcgatcaccccatcacggccaaggccattgccaagggtgtgggcatcatctctgagggcaacgagactgtggaggacatcgccgcccggctcaacattcccgtcagccaggttaacccccgggatgccaaggcctgcgtgatccacggcaccgacctcaaggacttcacctccgagcaaatcgacgagatcctgcagaatcacaccgagatcgtcttcgcccgcacatccccccagcagaagctcatcattgtggagggctgtcagagacagggtgcaattgtggctgtgaccggggatggtgtgaacgactcccccgctctgaagaaggccgacattggggtggccatgggcatcgctggctctgacgtctccaagcaggcagctgacatgatcctgctggacgacaactttgcctccatcgtcacaggggtggaggagggccgcctgatcttcgacaacctaaagaagtccattgcctacaccctgaccagcaatatcccggagatcacgcccttcctgctgttcatcatggccaacatcccgctgcccctgggcaccatcaccatcctctgcatcgatctgggcactgacatggtccctgccatctcactggcgtacgaggctgccgaaagcgacatcatgaagagacagcccaggaacccgcggacggacaaattggtcaatgagagactcatcagcatggcctacgggcagattggaatgatccaggctctcggtggcttcttctcttactttgtgatcctggcagaaaatggcttcttgcccggcaacctggtgggcatccggctgaactgggatgaccgcaccgtcaatgacctggaagacagttacgggcagcagtggacatacgagcagaggaaggtggtggagttcacctgccacacggccttctttgtgagcatcgttgtcgtccagtgggccgatctgatcatctgcaagacccggaggaactcggtcttccagcagggcatgaagaacaagatcctgatcttcgggctgtttgaggagacggccctggctgccttcctgtcctactgccccggcatggacgtggccctgcgcatgtaccctctcaagcccagctggtggttctgtgccttcccctacagtttcctcatcttcgtctacgacgaaatccgcaaactcatcctgcgcaggaacccagggggttgggtggagaaggaaacctactactgacctcagccccaccacatcgcccatctcttccccgtcccccaggcccaggaccgcccctgtcagtccccccaattttgtattctggggggaggagccctctcttcctgtggccccaccttggcccccaccccctccactatctcctgccgcccccactctggctggcttctctcccctgccccaaacctctctcctctctcttttctgtgtcagtttctctccctctcctcacccctctatccattcctcccgccccagccacctccctgggctcttttttactccccttcagccccccggctgatgccatctctggttctggacaattatcaaatatatcagtggggagagagaa

SEQ ID NO: 775 - DNA, 3466 bp, Homo sapiens
  source 1..3466: mol_type = genomic DNA
gtgtgtgtgtgcagcccctcatgtaggggagcaggcatgggaggctgggaggaggagaggaacaggagagccacggacaagaaagatgacaaggactcacccaagaagaacaagggcaaggagcgccgggacctggatgacctcaagaaggaggtggctatgacagagcacaagatgtcagtggaagaggtctgccggaaatacaacacagactgtgtgcagggtttgacccacagcaaagcccaggagatcctggcccgggatgggcctaacgcactcacgccaccgcctaccaccccagagtgggtcaagttttgccggcagctcttcgggggcttctccatcctgctgtggatcggggctatcctctgcttcctggcctacggtatccaggcgggcaccgaggacgacccctctggtgacaacctgtacctgggcatcgtgctggcggccgtggtgatcatcactggctgcttctcctactaccaggaggccaagagctccaagatcatggagtccttcaagaacatggtgccccagcaagccctggtgatccgggaaggtgagaagatgcaggtgaacgctgaggaggtggtggtcggggacctggtggagatcaagggtggagaccgagtgccagctgacctgcggatcatctcagcccacggctgcaaggtggacaactcctccctgactggcgaatccgagccccagactcgctctcccgactgcactcacgacaaccccttggagactcggaacatcaccttcttttccaccaactgtgtggaaggcacggctcggggcgtggtggtggccacgggcgaccgcactgtcatgggccgtatcgccaccctggcatcagggctggaggtgggcaagacgcccatcgccatcgagattgagcacttcatccagctcatcaccggcgtggctgtcttcctgggtgtctccttcttcatcctctccctcattctcggatacacctggcttgaggctgtcatcttcctcatcggcatcatcgtggccaatgtcccagagggtctgctggccactgtcactgtgtgtctgacgctgaccgccaagcgcatggcccggaagaactgcctggtgaagaacctggaggctgtagaaaccctgggctccacgtccaccatctgctcagataagacagggaccctcactcagaaccgcatgacagtcgcccacatgtggtttgacaaccagatccacgaggctgacaccactgaggaccagtcagggacctcatttgacaagagttcgcacacctgggtggccctgtctcacatcgctgggctctgcaatcgcgctgtcttcaagggtggtcaggacaacatccctgtgctcaagagggatgtggctggggatgcgtctgagtctgccctgctcaagtgcatcgagctgtcctctggctccgtgaagctgatgcgtgaacgcaacaagaaagtggctgagattcccttcaattccaccaacaaataccagctctccatccatgagaccgaggaccccaacgacaaccgatacctgctggtgatgaagggtgcccccgagcgcatcctggaccgctgctccaccatcctgctacagggcaaggagcagcctctggacgaggaaatgaaggaggccttccagaatgcctaccttgagctcggtggcctgggcgagcgcgtgcttggtttctgccattattacctgcccgaggagcagttccccaagggctttgccttcgactgtgatgacgtgaacttcaccacggacaacctctgctttgtgggcctcatgtccatgatcgacccaccccgggcagccgtccctgacgcggtgggcaagtgtcgcagcgcaggcatcaaggtcatcatggtcaccggcgatcaccccatcacggccaaggccattgccaagggtgtgggcatcatctctgagggcaacgagactgtggaggacatcgccgcccggctcaacattcccgtcagccaggttaacccccgggatgccaaggcctgcgtgatccacggcaccgacctcaaggacttcacctccgagcaaatcgacgagatcctgcagaatcacaccgagatcgtcttcgcccgcacatccccccagcagaagctcatcattgtggagggctgtcagagacagggtgcaattgtggctgtgaccggggatggtgtgaacgactcccccgctctgaagaaggccgacattggggtggccatgggcatcgctggctctgacgtctccaagcaggcagctgacatgatcctgctggacgacaactttgcctccatcgtcacaggggtggaggagggccgcctgatcttcgacaacctaaagaagtccattgcctacaccctgaccagcaatatcccggagatcacgcccttcctgctgttcatcatggccaacatcccgctgcccctgggcaccatcaccatcctctgcatcgatctgggcactgacatggtccctgccatctcactggcgtacgaggctgccgaaagcgacatcatgaagagacagcccaggaacccgcggacggacaaattggtcaatgagagactcatcagcatggcctacgggcagattggaatgatccaggctctcggtggcttcttctcttactttgtgatcctggcagaaaatggcttcttgcccggcaacctggtgggcatccggctgaactgggatgaccgcaccgtcaatgacctggaagacagttacgggcagcagtggacatacgagcagaggaaggtggtggagttcacctgccacacggccttctttgtgagcatcgttgtcgtccagtgggccgatctgatcatctgcaagacccggaggaactcggtcttccagcagggcatgaagaacaagatcctgatcttcgggctgtttgaggagacggccctggctgccttcctgtcctactgccccggcatggacgtggccctgcgcatgtaccctctcaagcccagctggtggttctgtgccttcccctacagtttcctcatcttcgtctacgacgaaatccgcaaactcatcctgcgcaggaacccagggggttgggtggagaaggaaacctactactgacctcagccccaccacatcgcccatctcttccccgtcccccaggcccaggaccgcccctgtcagtccccccaattttgtattctggggggaggagccctctcttcctgtggccccaccttggcccccaccccctccactatctcctgccgcccccactctggctggcttctctcccctgccccaaacctctctcctctctcttttctgtgtcagtttctctccctctcctcacccctctatccattcctcccgccccagccacctccctgggctcttttttactccccttcagccccccggctgatgccatctctggttctggacaattatcaaatatatcagtggggagagagaa

SEQ ID NO: 776 - DNA, 3590 bp, Homo sapiens
  source 1..3590: mol_type = genomic DNA
agcctctgtgcggtgggaccaacggacggacggacggacgcgcgcacctaccgaggcgcgggcgctgcagaggctcccagcccaagcctgagcctgagcccgccccgaggtccccgccccgcccgcctggctctctcgccgcggagccgccaagatggggtctggtggctctgacagctatcgtatcgccacctcgcaggacaagaaagatgacaaggactcacccaagaagaacaagggcaaggagcgccgggacctggatgacctcaagaaggaggtggctatgacagagcacaagatgtcagtggaagaggtctgccggaaatacaacacagactgtgtgcagggtttgacccacagcaaagcccaggagatcctggcccgggatgggcctaacgcactcacgccaccgcctaccaccccagagtgggtcaagttttgccggcagctcttcgggggcttctccatcctgctgtggatcggggctatcctctgcttcctggcctacggtatccaggcgggcaccgaggacgacccctctggtgacaacctgtacctgggcatcgtgctggcggccgtggtgatcatcactggctgcttctcctactaccaggaggccaagagctccaagatcatggagtccttcaagaacatggtgccccagcaagccctggtgatccgggaaggtgagaagatgcaggtgaacgctgaggaggtggtggtcggggacctggtggagatcaagggtggagaccgagtgccagctgacctgcggatcatctcagcccacggctgcaaggtggacaactcctccctgactggcgaatccgagccccagactcgctctcccgactgcactcacgacaaccccttggagactcggaacatcaccttcttttccaccaactgtgtggaaggcacggctcggggcgtggtggtggccacgggcgaccgcactgtcatgggccgtatcgccaccctggcatcagggctggaggtgggcaagacgcccatcgccatcgagattgagcacttcatccagctcatcaccggcgtggctgtcttcctgggtgtctccttcttcatcctctccctcattctcggatacacctggcttgaggctgtcatcttcctcatcggcatcatcgtggccaatgtcccagagggtctgctggccactgtcactgtgtgtctgacgctgaccgccaagcgcatggcccggaagaactgcctggtgaagaacctggaggctgtagaaaccctgggctccacgtccaccatctgctcagataagacagggaccctcactcagaaccgcatgacagtcgcccacatgtggtttgacaaccagatccacgaggctgacaccactgaggaccagtcagggacctcatttgacaagagttcgcacacctgggtggccctgtctcacatcgctgggctctgcaatcgcgctgtcttcaagggtggtcaggacaacatccctgtgctcaagagggatgtggctggggatgcgtctgagtctgccctgctcaagtgcatcgagctgtcctctggctccgtgaagctgatgcgtgaacgcaacaagaaagtggctgagattcccttcaattccaccaacaaataccagctctccatccatgagaccgaggaccccaacgacaaccgatacctgctggtgatgaagggtgcccccgagcgcatcctggaccgctgctccaccatcctgctacagggcaaggagcagcctctggacgaggaaatgaaggaggccttccagaatgcctaccttgagctcggtggcctgggcgagcgcgtgcttggtttctgccattattacctgcccgaggagcagttccccaagggctttgccttcgactgtgatgacgtgaacttcaccacggacaacctctgctttgtgggcctcatgtccatgatcgacccaccccgggcagccgtccctgacgcggtgggcaagtgtcgcagcgcaggcatcaaggtcatcatggtcaccggcgatcaccccatcacggccaaggccattgccaagggtgtgggcatcatctctgagggcaacgagactgtggaggacatcgccgcccggctcaacattcccgtcagccaggttaacccccgggatgccaaggcctgcgtgatccacggcaccgacctcaaggacttcacctccgagcaaatcgacgagatcctgcagaatcacaccgagatcgtcttcgcccgcacatccccccagcagaagctcatcattgtggagggctgtcagagacagggtgcaattgtggctgtgaccggggatggtgtgaacgactcccccgctctgaagaaggccgacattggggtggccatgggcatcgctggctctgacgtctccaagcaggcagctgacatgatcctgctggacgacaactttgcctccatcgtcacaggggtggaggagggccgcctgatcttcgacaacctaaagaagtccattgcctacaccctgaccagcaatatcccggagatcacgcccttcctgctgttcatcatggccaacatcccgctgcccctgggcaccatcaccatcctctgcatcgatctgggcactgacatggtccctgccatctcactggcgtacgaggctgccgaaagcgacatcatgaagagacagcccaggaacccgcggacggacaaattggtcaatgagagactcatcagcatggcctacgggcagattggaatgatccaggctctcggtggcttcttctcttactttgtgatcctggcagaaaatggcttcttgcccggcaacctggtgggcatccggctgaactgggatgaccgcaccgtcaatgacctggaagacagttacgggcagcagtggacatacgagcagaggaaggtggtggagttcacctgccacacggccttctttgtgagcatcgttgtcgtccagtgggccgatctgatcatctgcaagacccggaggaactcggtcttccagcagggcatgaagaacaagatcctgatcttcgggctgtttgaggagacggccctggctgccttcctgtcctactgccccggcatggacgtggccctgcgcatgtaccctctcaagcccagctggtggttctgtgccttcccctacagtttcctcatcttcgtctacgacgaaatccgcaaactcatcctgcgcaggaacccagggggttgggtggagaaggaaacctactactgacctcagccccaccacatcgcccatctcttccccgtcccccaggcccaggaccgcccctgtcagtccccccaattttgtattctggggggaggagccctctcttcctgtggccccaccttggcccccaccccctccactatctcctgccgcccccactctggctggcttctctcccctgccccaaacctctctcctctctcttttctgtgtcagtttctctccctctcctcacccctctatccattcctcccgccccagccacctccctgggctcttttttactccccttcagccccccggctgatgccatctctggttctggacaattatcaaatatatcagtggggagagagaa

SEQ ID NO: 777 - DNA, 3410 bp, Homo sapiens
  source 1..3410: mol_type = genomic DNA
cagccctggattcctccctgacaagaaagatgacaaggactcacccaagaagaacaagggcaaggagcgccgggacctggatgacctcaagaaggaggtggctatgacagagcacaagatgtcagtggaagaggtctgccggaaatacaacacagactgtgtgcagggtttgacccacagcaaagcccaggagatcctggcccgggatgggcctaacgcactcacgccaccgcctaccaccccagagtgggtcaagttttgccggcagctcttcgggggcttctccatcctgctgtggatcggggctatcctctgcttcctggcctacggtatccaggcgggcaccgaggacgacccctctggtgacaacctgtacctgggcatcgtgctggcggccgtggtgatcatcactggctgcttctcctactaccaggaggccaagagctccaagatcatggagtccttcaagaacatggtgccccagcaagccctggtgatccgggaaggtgagaagatgcaggtgaacgctgaggaggtggtggtcggggacctggtggagatcaagggtggagaccgagtgccagctgacctgcggatcatctcagcccacggctgcaaggtggacaactcctccctgactggcgaatccgagccccagactcgctctcccgactgcactcacgacaaccccttggagactcggaacatcaccttcttttccaccaactgtgtggaaggcacggctcggggcgtggtggtggccacgggcgaccgcactgtcatgggccgtatcgccaccctggcatcagggctggaggtgggcaagacgcccatcgccatcgagattgagcacttcatccagctcatcaccggcgtggctgtcttcctgggtgtctccttcttcatcctctccctcattctcggatacacctggcttgaggctgtcatcttcctcatcggcatcatcgtggccaatgtcccagagggtctgctggccactgtcactgtgtgtctgacgctgaccgccaagcgcatggcccggaagaactgcctggtgaagaacctggaggctgtagaaaccctgggctccacgtccaccatctgctcagataagacagggaccctcactcagaaccgcatgacagtcgcccacatgtggtttgacaaccagatccacgaggctgacaccactgaggaccagtcagggacctcatttgacaagagttcgcacacctgggtggccctgtctcacatcgctgggctctgcaatcgcgctgtcttcaagggtggtcaggacaacatccctgtgctcaagagggatgtggctggggatgcgtctgagtctgccctgctcaagtgcatcgagctgtcctctggctccgtgaagctgatgcgtgaacgcaacaagaaagtggctgagattcccttcaattccaccaacaaataccagctctccatccatgagaccgaggaccccaacgacaaccgatacctgctggtgatgaagggtgcccccgagcgcatcctggaccgctgctccaccatcctgctacagggcaaggagcagcctctggacgaggaaatgaaggaggccttccagaatgcctaccttgagctcggtggcctgggcgagcgcgtgcttggtttctgccattattacctgcccgaggagcagttccccaagggctttgccttcgactgtgatgacgtgaacttcaccacggacaacctctgctttgtgggcctcatgtccatgatcgacccaccccgggcagccgtccctgacgcggtgggcaagtgtcgcagcgcaggcatcaaggtcatcatggtcaccggcgatcaccccatcacggccaaggccattgccaagggtgtgggcatcatctctgagggcaacgagactgtggaggacatcgccgcccggctcaacattcccgtcagccaggttaacccccgggatgccaaggcctgcgtgatccacggcaccgacctcaaggacttcacctccgagcaaatcgacgagatcctgcagaatcacaccgagatcgtcttcgcccgcacatccccccagcagaagctcatcattgtggagggctgtcagagacagggtgcaattgtggctgtgaccggggatggtgtgaacgactcccccgctctgaagaaggccgacattggggtggccatgggcatcgctggctctgacgtctccaagcaggcagctgacatgatcctgctggacgacaactttgcctccatcgtcacaggggtggaggagggccgcctgatcttcgacaacctaaagaagtccattgcctacaccctgaccagcaatatcccggagatcacgcccttcctgctgttcatcatggccaacatcccgctgcccctgggcaccatcaccatcctctgcatcgatctgggcactgacatggtccctgccatctcactggcgtacgaggctgccgaaagcgacatcatgaagagacagcccaggaacccgcggacggacaaattggtcaatgagagactcatcagcatggcctacgggcagattggaatgatccaggctctcggtggcttcttctcttactttgtgatcctggcagaaaatggcttcttgcccggcaacctggtgggcatccggctgaactgggatgaccgcaccgtcaatgacctggaagacagttacgggcagcagtggacatacgagcagaggaaggtggtggagttcacctgccacacggccttctttgtgagcatcgttgtcgtccagtgggccgatctgatcatctgcaagacccggaggaactcggtcttccagcagggcatgaagaacaagatcctgatcttcgggctgtttgaggagacggccctggctgccttcctgtcctactgccccggcatggacgtggccctgcgcatgtaccctctcaagcccagctggtggttctgtgccttcccctacagtttcctcatcttcgtctacgacgaaatccgcaaactcatcctgcgcaggaacccagggggttgggtggagaaggaaacctactactgacctcagccccaccacatcgcccatctcttccccgtcccccaggcccaggaccgcccctgtcagtccccccaattttgtattctggggggaggagccctctcttcctgtggccccaccttggcccccaccccctccactatctcctgccgcccccactctggctggcttctctcccctgccccaaacctctctcctctctcttttctgtgtcagtttctctccctctcctcacccctctatccattcctcccgccccagccacctccctgggctcttttttactccccttcagccccccggctgatgccatctctggttctggacaattatcaaatatatcagtggggagagagaa

SEQ ID NO: 778 - DNA, 1868 bp, Homo sapiens
  source 1..1868: mol_type = genomic DNA
gagaatcgaggacggacggcctagccaggccaagaatgcaattgccccggtggtgggagctgggagacccctgtgcttggacgggacagggtcgggggacacgcaggatgagccccgcgaccactggcacattcttgctgacagtgtacagtattttctccaaggtacactccgatcggaatgtatacccatcagcaggtgtcctctttgttcatgttttggaaagagaatattttaagggggaatttccaccttacccaaaacctggcgagattagtaatgatcccataacatttaatacaaatttaatgggttacccagaccgacctggatggcttcgatatatccaaaggacaccatatagtgatggagtcctatatgggtccccaacagctgaaaatgtggggaagccaacaatcattgagataactgcctacaacaggcgcacctttgagactgcaaggcataatttgataattaatataatgtctgcagaagacttcccgttgccatatcaagcagaattcttcattaagaatatgaatgtagaagaaatgttggccagtgaggttcttggagactttcttggcgcagtgaaaaatgtgtggcagccagagcgcctgaacgccataaacatcacatcggccctagacaggggtggcagggtgccacttcccattaatgacctgaaggagggcgtttatgtcatggttggtgcagatgtcccgttttcttcttgtttacgagaagttgaaaatccacagaatcaattgagatgtagtcaagaaatggagcctgtaataacatgtgataaaaaatttcgtactcaattttacattgactggtgcaaaatttcattggttgataaaacaaagcaagtgtccacctatcaggaagtgattcgtggagaggggattttacctgatggtggagaatacaaacccccttctgattctttgaaaagcagagactattacacggatttcctaattacactggctgtgccctcggcagtggcactggtcctttttctaatacttgcttatatcatgtgctgccgacgggaaggcgtggaaaagagaaacatgcaaacaccagacatccaactggtccatcacagtgctattcagaaatctaccaaggagcttcgagacatgtccaagaatagagagatagcatggcccctgtcaacgcttcctgtgttccaccctgtgactggggaaatcatacctcctttacacacagacaactatgatagcacaaacatgccattgatgcaaacgcagcagaacttgccacatcagactcagattccccaacagcagactacaggtaaatggtatccctgaagaaagaaaactgactgaagcaatgaatttataatcagacaatatagcagttacatcacatttcttttctcttccaataatgcatgagcttttctggcatatgttatgcatgttggcagtattaagtgtataccaaataatacaacataactttcattttactaatgtatttttttgtacttaaagcatttttgacaatttgtaaaacattgatgactttatatttgttacaataaaagttgatctttaaaataaatattattaatgaagcctaatgactggtgaaatttacttcagtaaactatttgcttcctatttagtagaaatcttttaatcgctagaaacaggtttatgtgttcattctcattccacaagactttagtgcttcctatgaatatataaaatgcctgtgcctccgtgttccagttgagcaacccatttaaataatactttaactcttgtggcctgtaaatcctgttgttttatataccacttgggagtgttttcgaataaacctag

SEQ ID NO: 779 - DNA, 1876 bp, Homo sapiens
  source 1..1876: mol_type = genomic DNA
gagaatcgaggacggacggcctagccaggccaagaatgcaattgccccggtggtgggagctgggagacccctgtgcttggacgggacagggtcgggggacacgcaggatgagccccgcgaccactggcacattcttgctgacagtgtacagtattttctccaaggtacactccgatcggaatgtatacccatcagcaggtgtcctctttgttcatgttttggaaagagaatattttaagggggaatttccaccttacccaaaacctggcgagattagtaatgatcccataacatttaatacaaatttaatgggttacccagaccgacctggatggcttcgatatatccaaaggacaccatatagtgatggagtcctatatgggtccccaacagctgaaaatgtggggaagccaacaatcattgagataactgcctacaacaggcgcacctttgagactgcaaggcataatttgataattaatataatgtctgcagaagacttcccgttgccatatcaagcagaattcttcattaagaatatgaatgtagaagaaatgttggccagtgaggttcttggagactttcttggcgcagtgaaaaatgtgtggcagccagagcgcctgaacgccataaacatcacatcggccctagacaggggtggcagggtgccacttcccattaatgacctgaaggagggcgtttatgtcatggttggtgcagatgtcccgttttcttcttgtttacgagaagttgaaaatccacagaatcaattgagatgtagtcaagaaatggagcctgtaataacatgtgataaaaaatttcgtactcaattttacattgactggtgcaaaatttcattggttgataaaacaaagcaagtgtccacctatcaggaagtgattcgtggagaggggattttacctgatggtggagaatacaaacccccttctgattctttgaaaagcagagactattacacggatttcctaattacactggctgtgccctcggcagtggcactggtcctttttctaatacttgcttatatcatgtgctgccgacgggaaggcgtcatccaactggtccatcacagtgctattcagaaatctaccaaggagcttcgagacatgtccaagaatagagagatagcatggcccctgtcaacgcttcctgtgttccaccctgtgactggggaaatcatacctcctttacacacagacaactatgatagcacaaacatgccattgatgcaaacgcagcagaacttgccacatcagactcagattccccaacagcagactacaggagattttcgtttgacaacttttcaaagatttgaggtaaatggtatccctgaagaaagaaaactgactgaagcaatgaatttataatcagacaatatagcagttacatcacatttcttttctcttccaataatgcatgagcttttctggcatatgttatgcatgttggcagtattaagtgtataccaaataatacaacataactttcattttactaatgtatttttttgtacttaaagcatttttgacaatttgtaaaacattgatgactttatatttgttacaataaaagttgatctttaaaataaatattattaatgaagcctaatgactggtgaaatttacttcagtaaactatttgcttcctatttagtagaaatcttttaatcgctagaaacaggtttatgtgttcattctcattccacaagactttagtgcttcctatgaatatataaaatgcctgtgcctccgtgttccagttgagcaacccatttaaataatactttaactcttgtggcctgtaaatcctgttgttttatataccacttgggagtgttttcgaataaacctag

SEQ ID NO: 780 - DNA, 1943 bp, Homo sapiens
  source 1..1943: mol_type = genomic DNA
gagaatcgaggacggacggcctagccaggccaagaatgcaattgccccggtggtgggagctgggagacccctgtgcttggacgggacagggtcgggggacacgcaggatgagccccgcgaccactggcacattcttgctgacagtgtacagtattttctccaaggtacactccgatcggaatgtatacccatcagcaggtgtcctctttgttcatgttttggaaagagaatattttaagggggaatttccaccttacccaaaacctggcgagattagtaatgatcccataacatttaatacaaatttaatgggttacccagaccgacctggatggcttcgatatatccaaaggacaccatatagtgatggagtcctatatgggtccccaacagctgaaaatgtggggaagccaacaatcattgagataactgcctacaacaggcgcacctttgagactgcaaggcataatttgataattaatataatgtctgcagaagacttcccgttgccatatcaagcagaattcttcattaagaatatgaatgtagaagaaatgttggccagtgaggttcttggagactttcttggcgcagtgaaaaatgtgtggcagccagagcgcctgaacgccataaacatcacatcggccctagacaggggtggcagggtgccacttcccattaatgacctgaaggagggcgtttatgtcatggttggtgcagatgtcccgttttcttcttgtttacgagaagttgaaaatccacagaatcaattgagatgtagtcaagaaatggagcctgtaataacatgtgataaaaaatttcgtactcaattttacattgactggtgcaaaatttcattggttgataaaacaaagcaagtgtccacctatcaggaagtgattcgtggagaggggattttacctgatggtggagaatacaaacccccttctgattctttgaaaagcagagactattacacggatttcctaattacactggctgtgccctcggcagtggcactggtcctttttctaatacttgcttatatcatgtgctgccgacgggaaggcgtggaaaagagaaacatgcaaacaccagacatccaactggtccatcacagtgctattcagaaatctaccaaggagcttcgagacatgtccaagaatagagagatagcatggcccctgtcaacgcttcctgtgttccaccctgtgactggggaaatcatacctcctttacacacagacaactatgatagcacaaacatgccattgatgcaaacgcagcaatggagtttcgctcctgttgcccaggctggagtgcaatggagcgatcttggctcactgcagcctccgcctcccaggaacttgccacatcagactcagattccccaacagcagactacaggtaaatggtatccctgaagaaagaaaactgactgaagcaatgaatttataatcagacaatatagcagttacatcacatttcttttctcttccaataatgcatgagcttttctggcatatgttatgcatgttggcagtattaagtgtataccaaataatacaacataactttcattttactaatgtatttttttgtacttaaagcatttttgacaatttgtaaaacattgatgactttatatttgttacaataaaagttgatctttaaaataaatattattaatgaagcctaatgactggtgaaatttacttcagtaaactatttgcttcctatttagtagaaatcttttaatcgctagaaacaggtttatgtgttcattctcattccacaagactttagtgcttcctatgaatatataaaatgcctgtgcctccgtgttccagttgagcaacccatttaaataatactttaactcttgtggcctgtaaatcctgttgttttatataccacttgggagtgttttcgaataaacctag

SEQ ID NO: 781 - DNA, 1745 bp, Homo sapiens
  source 1..1745: mol_type = genomic DNA
gagaatcgaggacggacggcctagccaggccaagaatgcaattgccccggtggtgggagctgggagacccctgtgcttggacgggacagggtcgggggacacgcaggatgagccccgcgaccactggcacattcttgctgacaggcgagattagtaatgatcccataacatttaatacaaatttaatgggttacccagaccgacctggatggcttcgatatatccaaaggacaccatatagtgatggagtcctatatgggtccccaacagctgaaaatgtggggaagccaacaatcattgagataactgcctacaacaggcgcacctttgagactgcaaggcataatttgataattaatataatgtctgcagaagacttcccgttgccatatcaagcagaattcttcattaagaatatgaatgtagaagaaatgttggccagtgaggttcttggagactttcttggcgcagtgaaaaatgtgtggcagccagagcgcctgaacgccataaacatcacatcggccctagacaggggtggcagggtgccacttcccattaatgacctgaaggagggcgtttatgtcatggttggtgcagatgtcccgttttcttcttgtttacgagaagttgaaaatccacagaatcaattgagatgtagtcaagaaatggagcctgtaataacatgtgataaaaaatttcgtactcaattttacattgactggtgcaaaatttcattggttgataaaacaaagcaagtgtccacctatcaggaagtgattcgtggagaggggattttacctgatggtggagaatacaaacccccttctgattctttgaaaagcagagactattacacggatttcctaattacactggctgtgccctcggcagtggcactggtcctttttctaatacttgcttatatcatgtgctgccgacgggaaggcgtggaaaagagaaacatgcaaacaccagacatccaactggtccatcacagtgctattcagaaatctaccaaggagcttcgagacatgtccaagaatagagagatagcatggcccctgtcaacgcttcctgtgttccaccctgtgactggggaaatcatacctcctttacacacagacaactatgatagcacaaacatgccattgatgcaaacgcagcagaacttgccacatcagactcagattccccaacagcagactacaggtaaatggtatccctgaagaaagaaaactgactgaagcaatgaatttataatcagacaatatagcagttacatcacatttcttttctcttccaataatgcatgagcttttctggcatatgttatgcatgttggcagtattaagtgtataccaaataatacaacataactttcattttactaatgtatttttttgtacttaaagcatttttgacaatttgtaaaacattgatgactttatatttgttacaataaaagttgatctttaaaataaatattattaatgaagcctaatgactggtgaaatttacttcagtaaactatttgcttcctatttagtagaaatcttttaatcgctagaaacaggtttatgtgttcattctcattccacaagactttagtgcttcctatgaatatataaaatgcctgtgcctccgtgttccagttgagcaacccatttaaataatactttaactcttgtggcctgtaaatcctgttgttttatataccacttgggagtgttttcgaataaacctag

SEQ ID NO: 782 - DNA, 1976 bp, Homo sapiens
  source 1..1976: mol_type = genomic DNA
gagaatcgaggacggacggcctagccaggccaagaatgcaattgccccggtggtgggagctgggagacccctgtgcttggacgggacagggtcgggggacacgcaggatgagccccgcgaccactggcacattcttgctgacagcttttttattaagctgtgctgatggcataaatggaacagttaactggaagaccagacaggccaacaattttattatcagcagaaaaatggctgctgggatgaaagatgtgtacagtattttctccaaggtacactccgatcggaatgtatacccatcagcaggtgtcctctttgttcatgttttggaaagagaatattttaagggggaatttccaccttacccaaaacctggcgagattagtaatgatcccataacatttaatacaaatttaatgggttacccagaccgacctggatggcttcgatatatccaaaggacaccatatagtgatggagtcctatatgggtccccaacagctgaaaatgtggggaagccaacaatcattgagataactgcctacaacaggcgcacctttgagactgcaaggcataatttgataattaatataatgtctgcagaagacttcccgttgccatatcaagcagaattcttcattaagaatatgaatgtagaagaaatgttggccagtgaggttcttggagactttcttggcgcagtgaaaaatgtgtggcagccagagcgcctgaacgccataaacatcacatcggccctagacaggggtggcagggtgccacttcccattaatgacctgaaggagggcgtttatgtcatggttggtgcagatgtcccgttttcttcttgtttacgagaagttgaaaatccacagaatcaattgagatgtagtcaagaaatggagcctgtaataacatgtgataaaaaatttcgtactcaattttacattgactggtgcaaaatttcattggttgataaaacaaagcaagtgtccacctatcaggaagtgattcgtggagaggggattttacctgatggtggagaatacaaacccccttctgattctttgaaaagcagagactattacacggatttcctaattacactggctgtgccctcggcagtggcactggtcctttttctaatacttgcttatatcatgtgctgccgacgggaaggcgtggaaaagagaaacatgcaaacaccagacatccaactggtccatcacagtgctattcagaaatctaccaaggagcttcgagacatgtccaagaatagagagatagcatggcccctgtcaacgcttcctgtgttccaccctgtgactggggaaatcatacctcctttacacacagacaactatgatagcacaaacatgccattgatgcaaacgcagcagaacttgccacatcagactcagattccccaacagcagactacaggtaaatggtatccctgaagaaagaaaactgactgaagcaatgaatttataatcagacaatatagcagttacatcacatttcttttctcttccaataatgcatgagcttttctggcatatgttatgcatgttggcagtattaagtgtataccaaataatacaacataactttcattttactaatgtatttttttgtacttaaagcatttttgacaatttgtaaaacattgatgactttatatttgttacaataaaagttgatctttaaaataaatattattaatgaagcctaatgactggtgaaatttacttcagtaaactatttgcttcctatttagtagaaatcttttaatcgctagaaacaggtttatgtgttcattctcattccacaagactttagtgcttcctatgaatatataaaatgcctgtgcctccgtgttccagttgagcaacccatttaaataatactttaactcttgtggcctgtaaatcctgttgttttatataccacttgggagtgttttcgaataaacctag

SEQ ID NO: 783 - DNA, 1949 bp, Homo sapiens
  source 1..1949: mol_type = genomic DNA
gagaatcgaggacggacggcctagccaggccaagaatgcaattgccccggtggtgggagctgggagacccctgtgcttggacgggacagggtcgggggacacgcaggatgagccccgcgaccactggcacattcttgctgacagcttttttattaagctgtgctgatggcataaatggaacagttaactggaagaccagacaggccaacaattttattatcagcagaaaaatggctgctgggatgaaagatgtgtacagtattttctccaaggtacactccgatcggaatgtatacccatcagcaggtgtcctctttgttcatgttttggaaagagaatattttaagggggaatttccaccttacccaaaacctggcgagattagtaatgatcccataacatttaatacaaatttaatgggttacccagaccgacctggatggcttcgatatatccaaaggacaccatatagtgatggagtcctatatgggtccccaacagctgaaaatgtggggaagccaacaatcattgagataactgcctacaacaggcgcacctttgagactgcaaggcataatttgataattaatataatgtctgcagaagacttcccgttgccatatcaagcagaattcttcattaagaatatgaatgtagaagaaatgttggccagtgaggttcttggagactttcttggcgcagtgaaaaatgtgtggcagccagagcgcctgaacgccataaacatcacatcggccctagacaggggtggcagggtgccacttcccattaatgacctgaaggagggcgtttatgtcatggttggtgcagatgtcccgttttcttcttgtttacgagaagttgaaaatccacagaatcaattgagatgtagtcaagaaatggagcctgtaataacatgtgataaaaaatttcgtactcaattttacattgactggtgcaaaatttcattggttgataaaacaaagcaagtgtccacctatcaggaagtgattcgtggagaggggattttacctgatggtggagaatacaaacccccttctgattctttgaaaagcagagactattacacggatttcctaattacactggctgtgccctcggcagtggcactggtcctttttctaatacttgcttatatcatgtgctgccgacgggaaggcgtcatccaactggtccatcacagtgctattcagaaatctaccaaggagcttcgagacatgtccaagaatagagagatagcatggcccctgtcaacgcttcctgtgttccaccctgtgactggggaaatcatacctcctttacacacagacaactatgatagcacaaacatgccattgatgcaaacgcagcagaacttgccacatcagactcagattccccaacagcagactacaggtaaatggtatccctgaagaaagaaaactgactgaagcaatgaatttataatcagacaatatagcagttacatcacatttcttttctcttccaataatgcatgagcttttctggcatatgttatgcatgttggcagtattaagtgtataccaaataatacaacataactttcattttactaatgtatttttttgtacttaaagcatttttgacaatttgtaaaacattgatgactttatatttgttacaataaaagttgatctttaaaataaatattattaatgaagcctaatgactggtgaaatttacttcagtaaactatttgcttcctatttagtagaaatcttttaatcgctagaaacaggtttatgtgttcattctcattccacaagactttagtgcttcctatgaatatataaaatgcctgtgcctccgtgttccagttgagcaacccatttaaataatactttaactcttgtggcctgtaaatcctgttgttttatataccacttgggagtgttttcgaataaacctag

SEQ ID NO: 784 - DNA, 1841 bp, Homo sapiens
  source 1..1841: mol_type = genomic DNA
gagaatcgaggacggacggcctagccaggccaagaatgcaattgccccggtggtgggagctgggagacccctgtgcttggacgggacagggtcgggggacacgcaggatgagccccgcgaccactggcacattcttgctgacagtgtacagtattttctccaaggtacactccgatcggaatgtatacccatcagcaggtgtcctctttgttcatgttttggaaagagaatattttaagggggaatttccaccttacccaaaacctggcgagattagtaatgatcccataacatttaatacaaatttaatgggttacccagaccgacctggatggcttcgatatatccaaaggacaccatatagtgatggagtcctatatgggtccccaacagctgaaaatgtggggaagccaacaatcattgagataactgcctacaacaggcgcacctttgagactgcaaggcataatttgataattaatataatgtctgcagaagacttcccgttgccatatcaagcagaattcttcattaagaatatgaatgtagaagaaatgttggccagtgaggttcttggagactttcttggcgcagtgaaaaatgtgtggcagccagagcgcctgaacgccataaacatcacatcggccctagacaggggtggcagggtgccacttcccattaatgacctgaaggagggcgtttatgtcatggttggtgcagatgtcccgttttcttcttgtttacgagaagttgaaaatccacagaatcaattgagatgtagtcaagaaatggagcctgtaataacatgtgataaaaaatttcgtactcaattttacattgactggtgcaaaatttcattggttgataaaacaaagcaagtgtccacctatcaggaagtgattcgtggagaggggattttacctgatggtggagaatacaaacccccttctgattctttgaaaagcagagactattacacggatttcctaattacactggctgtgccctcggcagtggcactggtcctttttctaatacttgcttatatcatgtgctgccgacgggaaggcgtcatccaactggtccatcacagtgctattcagaaatctaccaaggagcttcgagacatgtccaagaatagagagatagcatggcccctgtcaacgcttcctgtgttccaccctgtgactggggaaatcatacctcctttacacacagacaactatgatagcacaaacatgccattgatgcaaacgcagcagaacttgccacatcagactcagattccccaacagcagactacaggtaaatggtatccctgaagaaagaaaactgactgaagcaatgaatttataatcagacaatatagcagttacatcacatttcttttctcttccaataatgcatgagcttttctggcatatgttatgcatgttggcagtattaagtgtataccaaataatacaacataactttcattttactaatgtatttttttgtacttaaagcatttttgacaatttgtaaaacattgatgactttatatttgttacaataaaagttgatctttaaaataaatattattaatgaagcctaatgactggtgaaatttacttcagtaaactatttgcttcctatttagtagaaatcttttaatcgctagaaacaggtttatgtgttcattctcattccacaagactttagtgcttcctatgaatatataaaatgcctgtgcctccgtgttccagttgagcaacccatttaaataatactttaactcttgtggcctgtaaatcctgttgttttatataccacttgggagtgttttcgaataaacctag

SEQ ID NO: 785 - DNA, 2038 bp, Homo sapiens
  source 1..2038: mol_type = genomic DNA
gagaatcgaggacggacggcctagccaggccaagaatgcaattgccccggtggtgggagctgggagacccctgtgcttggacgggacagggtcgggggacacgcaggatgagccccgcgaccactggcacattcttgctgacagtggaatatgaaagagacaaatgaagtagtggacagagaaagacttgacagtttgcttttaagcttttttattaagctgtgctgatggcataaatggaacagttaactggaagaccagacaggccaacaattttattatcagcagaaaaatggctgctgggatgaaagatgtgtacagtattttctccaaggtacactccgatcggaatgtatacccatcagcaggtgtcctctttgttcatgttttggaaagagaatattttaagggggaatttccaccttacccaaaacctggcgagattagtaatgatcccataacatttaatacaaatttaatgggttacccagaccgacctggatggcttcgatatatccaaaggacaccatatagtgatggagtcctatatgggtccccaacagctgaaaatgtggggaagccaacaatcattgagataactgcctacaacaggcgcacctttgagactgcaaggcataatttgataattaatataatgtctgcagaagacttcccgttgccatatcaagcagaattcttcattaagaatatgaatgtagaagaaatgttggccagtgaggttcttggagactttcttggcgcagtgaaaaatgtgtggcagccagagcgcctgaacgccataaacatcacatcggccctagacaggggtggcagggtgccacttcccattaatgacctgaaggagggcgtttatgtcatggttggtgcagatgtcccgttttcttcttgtttacgagaagttgaaaatccacagaatcaattgagatgtagtcaagaaatggagcctgtaataacatgtgataaaaaatttcgtactcaattttacattgactggtgcaaaatttcattggttgataaaacaaagcaagtgtccacctatcaggaagtgattcgtggagaggggattttacctgatggtggagaatacaaacccccttctgattctttgaaaagcagagactattacacggatttcctaattacactggctgtgccctcggcagtggcactggtcctttttctaatacttgcttatatcatgtgctgccgacgggaaggcgtggaaaagagaaacatgcaaacaccagacatccaactggtccatcacagtgctattcagaaatctaccaaggagcttcgagacatgtccaagaatagagagatagcatggcccctgtcaacgcttcctgtgttccaccctgtgactggggaaatcatacctcctttacacacagacaactatgatagcacaaacatgccattgatgcaaacgcagcagaacttgccacatcagactcagattccccaacagcagactacaggtaaatggtatccctgaagaaagaaaactgactgaagcaatgaatttataatcagacaatatagcagttacatcacatttcttttctcttccaataatgcatgagcttttctggcatatgttatgcatgttggcagtattaagtgtataccaaataatacaacataactttcattttactaatgtatttttttgtacttaaagcatttttgacaatttgtaaaacattgatgactttatatttgttacaataaaagttgatctttaaaataaatattattaatgaagcctaatgactggtgaaatttacttcagtaaactatttgcttcctatttagtagaaatcttttaatcgctagaaacaggtttatgtgttcattctcattccacaagactttagtgcttcctatgaatatataaaatgcctgtgcctccgtgttccagttgagcaacccatttaaataatactttaactcttgtggcctgtaaatcctgttgttttatataccacttgggagtgttttcgaataaacctag

SEQ ID NO: 786 - DNA, 1930 bp, Homo sapiens
  source 1..1930: mol_type = genomic DNA
gagaatcgaggacggacggcctagccaggccaagaatgcaattgccccggtggtgggagctgggagacccctgtgcttggacgggacagggtcgggggacacgcaggatgagccccgcgaccactggcacattcttgctgacagtggaatatgaaagagacaaatgaagtagtggacagagaaagacttgacagtttgcttttaagtgtacagtattttctccaaggtacactccgatcggaatgtatacccatcagcaggtgtcctctttgttcatgttttggaaagagaatattttaagggggaatttccaccttacccaaaacctggcgagattagtaatgatcccataacatttaatacaaatttaatgggttacccagaccgacctggatggcttcgatatatccaaaggacaccatatagtgatggagtcctatatgggtccccaacagctgaaaatgtggggaagccaacaatcattgagataactgcctacaacaggcgcacctttgagactgcaaggcataatttgataattaatataatgtctgcagaagacttcccgttgccatatcaagcagaattcttcattaagaatatgaatgtagaagaaatgttggccagtgaggttcttggagactttcttggcgcagtgaaaaatgtgtggcagccagagcgcctgaacgccataaacatcacatcggccctagacaggggtggcagggtgccacttcccattaatgacctgaaggagggcgtttatgtcatggttggtgcagatgtcccgttttcttcttgtttacgagaagttgaaaatccacagaatcaattgagatgtagtcaagaaatggagcctgtaataacatgtgataaaaaatttcgtactcaattttacattgactggtgcaaaatttcattggttgataaaacaaagcaagtgtccacctatcaggaagtgattcgtggagaggggattttacctgatggtggagaatacaaacccccttctgattctttgaaaagcagagactattacacggatttcctaattacactggctgtgccctcggcagtggcactggtcctttttctaatacttgcttatatcatgtgctgccgacgggaaggcgtggaaaagagaaacatgcaaacaccagacatccaactggtccatcacagtgctattcagaaatctaccaaggagcttcgagacatgtccaagaatagagagatagcatggcccctgtcaacgcttcctgtgttccaccctgtgactggggaaatcatacctcctttacacacagacaactatgatagcacaaacatgccattgatgcaaacgcagcagaacttgccacatcagactcagattccccaacagcagactacaggtaaatggtatccctgaagaaagaaaactgactgaagcaatgaatttataatcagacaatatagcagttacatcacatttcttttctcttccaataatgcatgagcttttctggcatatgttatgcatgttggcagtattaagtgtataccaaataatacaacataactttcattttactaatgtatttttttgtacttaaagcatttttgacaatttgtaaaacattgatgactttatatttgttacaataaaagttgatctttaaaataaatattattaatgaagcctaatgactggtgaaatttacttcagtaaactatttgcttcctatttagtagaaatcttttaatcgctagaaacaggtttatgtgttcattctcattccacaagactttagtgcttcctatgaatatataaaatgcctgtgcctccgtgttccagttgagcaacccatttaaataatactttaactcttgtggcctgtaaatcctgttgttttatataccacttgggagtgttttcgaataaacctag

SEQ ID NO: 787 - DNA, 2017 bp, Homo sapiens
  source 1..2017: mol_type = genomic DNA
gagaatcgaggacggacggcctagccaggccaagaatgcaattgccccggtggtgggagctgggagacccctgtgcttggacgggacagggtcgggggacacgcaggatgagccccgcgaccactggcacattcttgctgacaggtccagaagttaggacaggccgggtgcagtggcccacacctgtaatcccagcactttggcaggccgagcttttttattaagctgtgctgatggcataaatggaacagttaactggaagaccagacaggccaacaattttattatcagcagaaaaatggctgctgggatgaaagatgtgtacagtattttctccaaggtacactccgatcggaatgtatacccatcagcaggtgtcctctttgttcatgttttggaaagagaatattttaagggggaatttccaccttacccaaaacctggcgagattagtaatgatcccataacatttaatacaaatttaatgggttacccagaccgacctggatggcttcgatatatccaaaggacaccatatagtgatggagtcctatatgggtccccaacagctgaaaatgtggggaagccaacaatcattgagataactgcctacaacaggcgcacctttgagactgcaaggcataatttgataattaatataatgtctgcagaagacttcccgttgccatatcaagcagaattcttcattaagaatatgaatgtagaagaaatgttggccagtgaggttcttggagactttcttggcgcagtgaaaaatgtgtggcagccagagcgcctgaacgccataaacatcacatcggccctagacaggggtggcagggtgccacttcccattaatgacctgaaggagggcgtttatgtcatggttggtgcagatgtcccgttttcttcttgtttacgagaagttgaaaatccacagaatcaattgagatgtagtcaagaaatggagcctgtaataacatgtgataaaaaatttcgtactcaattttacattgactggtgcaaaatttcattggttgataaaacaaagcaagtgtccacctatcaggaagtgattcgtggagaggggattttacctgatggtggagaatacaaacccccttctgattctttgaaaagcagagactattacacggatttcctaattacactggctgtgccctcggcagtggcactggtcctttttctaatacttgcttatatcatgtgctgccgacgggaaggcgtcatccaactggtccatcacagtgctattcagaaatctaccaaggagcttcgagacatgtccaagaatagagagatagcatggcccctgtcaacgcttcctgtgttccaccctgtgactggggaaatcatacctcctttacacacagacaactatgatagcacaaacatgccattgatgcaaacgcagcagaacttgccacatcagactcagattccccaacagcagactacaggtaaatggtatccctgaagaaagaaaactgactgaagcaatgaatttataatcagacaatatagcagttacatcacatttcttttctcttccaataatgcatgagcttttctggcatatgttatgcatgttggcagtattaagtgtataccaaataatacaacataactttcattttactaatgtatttttttgtacttaaagcatttttgacaatttgtaaaacattgatgactttatatttgttacaataaaagttgatctttaaaataaatattattaatgaagcctaatgactggtgaaatttacttcagtaaactatttgcttcctatttagtagaaatcttttaatcgctagaaacaggtttatgtgttcattctcattccacaagactttagtgcttcctatgaatatataaaatgcctgtgcctccgtgttccagttgagcaacccatttaaataatactttaactcttgtggcctgtaaatcctgttgttttatataccacttgggagtgttttcgaataaacctag

SEQ ID NO: 788 - DNA, 1903 bp, Homo sapiens
  source 1..1903: mol_type = genomic DNA
gagaatcgaggacggacggcctagccaggccaagaatgcaattgccccggtggtgggagctgggagacccctgtgcttggacgggacagggtcgggggacacgcaggatgagccccgcgaccactggcacattcttgctgacagtggaatatgaaagagacaaatgaagtagtggacagagaaagacttgacagtttgcttttaagtgtacagtattttctccaaggtacactccgatcggaatgtatacccatcagcaggtgtcctctttgttcatgttttggaaagagaatattttaagggggaatttccaccttacccaaaacctggcgagattagtaatgatcccataacatttaatacaaatttaatgggttacccagaccgacctggatggcttcgatatatccaaaggacaccatatagtgatggagtcctatatgggtccccaacagctgaaaatgtggggaagccaacaatcattgagataactgcctacaacaggcgcacctttgagactgcaaggcataatttgataattaatataatgtctgcagaagacttcccgttgccatatcaagcagaattcttcattaagaatatgaatgtagaagaaatgttggccagtgaggttcttggagactttcttggcgcagtgaaaaatgtgtggcagccagagcgcctgaacgccataaacatcacatcggccctagacaggggtggcagggtgccacttcccattaatgacctgaaggagggcgtttatgtcatggttggtgcagatgtcccgttttcttcttgtttacgagaagttgaaaatccacagaatcaattgagatgtagtcaagaaatggagcctgtaataacatgtgataaaaaatttcgtactcaattttacattgactggtgcaaaatttcattggttgataaaacaaagcaagtgtccacctatcaggaagtgattcgtggagaggggattttacctgatggtggagaatacaaacccccttctgattctttgaaaagcagagactattacacggatttcctaattacactggctgtgccctcggcagtggcactggtcctttttctaatacttgcttatatcatgtgctgccgacgggaaggcgtcatccaactggtccatcacagtgctattcagaaatctaccaaggagcttcgagacatgtccaagaatagagagatagcatggcccctgtcaacgcttcctgtgttccaccctgtgactggggaaatcatacctcctttacacacagacaactatgatagcacaaacatgccattgatgcaaacgcagcagaacttgccacatcagactcagattccccaacagcagactacaggtaaatggtatccctgaagaaagaaaactgactgaagcaatgaatttataatcagacaatatagcagttacatcacatttcttttctcttccaataatgcatgagcttttctggcatatgttatgcatgttggcagtattaagtgtataccaaataatacaacataactttcattttactaatgtatttttttgtacttaaagcatttttgacaatttgtaaaacattgatgactttatatttgttacaataaaagttgatctttaaaataaatattattaatgaagcctaatgactggtgaaatttacttcagtaaactatttgcttcctatttagtagaaatcttttaatcgctagaaacaggtttatgtgttcattctcattccacaagactttagtgcttcctatgaatatataaaatgcctgtgcctccgtgttccagttgagcaacccatttaaataatactttaactcttgtggcctgtaaatcctgttgttttatataccacttgggagtgttttcgaataaacctag

SEQ ID NO: 789 - DNA, 1718 bp, Homo sapiens
  source 1..1718: mol_type = genomic DNA
gagaatcgaggacggacggcctagccaggccaagaatgcaattgccccggtggtgggagctgggagacccctgtgcttggacgggacagggtcgggggacacgcaggatgagccccgcgaccactggcacattcttgctgacaggcgagattagtaatgatcccataacatttaatacaaatttaatgggttacccagaccgacctggatggcttcgatatatccaaaggacaccatatagtgatggagtcctatatgggtccccaacagctgaaaatgtggggaagccaacaatcattgagataactgcctacaacaggcgcacctttgagactgcaaggcataatttgataattaatataatgtctgcagaagacttcccgttgccatatcaagcagaattcttcattaagaatatgaatgtagaagaaatgttggccagtgaggttcttggagactttcttggcgcagtgaaaaatgtgtggcagccagagcgcctgaacgccataaacatcacatcggccctagacaggggtggcagggtgccacttcccattaatgacctgaaggagggcgtttatgtcatggttggtgcagatgtcccgttttcttcttgtttacgagaagttgaaaatccacagaatcaattgagatgtagtcaagaaatggagcctgtaataacatgtgataaaaaatttcgtactcaattttacattgactggtgcaaaatttcattggttgataaaacaaagcaagtgtccacctatcaggaagtgattcgtggagaggggattttacctgatggtggagaatacaaacccccttctgattctttgaaaagcagagactattacacggatttcctaattacactggctgtgccctcggcagtggcactggtcctttttctaatacttgcttatatcatgtgctgccgacgggaaggcgtcatccaactggtccatcacagtgctattcagaaatctaccaaggagcttcgagacatgtccaagaatagagagatagcatggcccctgtcaacgcttcctgtgttccaccctgtgactggggaaatcatacctcctttacacacagacaactatgatagcacaaacatgccattgatgcaaacgcagcagaacttgccacatcagactcagattccccaacagcagactacaggtaaatggtatccctgaagaaagaaaactgactgaagcaatgaatttataatcagacaatatagcagttacatcacatttcttttctcttccaataatgcatgagcttttctggcatatgttatgcatgttggcagtattaagtgtataccaaataatacaacataactttcattttactaatgtatttttttgtacttaaagcatttttgacaatttgtaaaacattgatgactttatatttgttacaataaaagttgatctttaaaataaatattattaatgaagcctaatgactggtgaaatttacttcagtaaactatttgcttcctatttagtagaaatcttttaatcgctagaaacaggtttatgtgttcattctcattccacaagactttagtgcttcctatgaatatataaaatgcctgtgcctccgtgttccagttgagcaacccatttaaataatactttaactcttgtggcctgtaaatcctgttgttttatataccacttgggagtgttttcgaataaacctag

SEQ ID NO: 790 - DNA, 2987 bp, Homo sapiens
  source 1..2987: mol_type = genomic DNA
gggggtgggatctgaacatggcggcggtggtagctgctacggcgctgaagggccggggggcgagaaatgcccgcgtcctccgggggattctcgcaggagccacagctaacaaggcttctcataacaggacccgggccctgcaaagccacagctccccagagggcaaggaggaacctgaacccctatccccggagctggaatacattcccagaaagaggggcaagaaccccatgaaagctgtgggactggcctggtacagcctgtacacccgcacctggctcgggtacctcttctaccgacagcagctgcgcagggctcggaatcgctaccctaaaggccactcgaaaacccagccccgcctcttcaatggagtgaaggtgcttcccatccctgtcctctcggacaactacagctacctcatcatcgacacccaggcccagctggctgtggctgtggacccttcagaccctcgggctgtgcaggcttccattgaaaaggaaggggtcaccttggtcgccattctgtgtactcacaagcactgggaccacagtggagggaaccgtgacctcagccggcggcaccgggactgtcgggtgtacgggagccctcaggacggcatcccctacctcacccatcccctgtgtcatcaagatgtggtcagcgtgggacggcttcagatccgggccctggctacacctggccacacacaaggccatctggtctacctactggatggggagccctacaagggtccctcctgcctcttctcaggggacctgctcttcctctctggctgtgggcggacctttgagggcaatgcagagaccatgctgagctcactggacactgtgctggggctaggggatgacacccttctgtggcctggtcatgagtatgcagaggagaacctgggctttgcaggtgtggtggagcccgagaacctggcccgggagaggaagatgcagtgggtgcagcggcagcggctggagcgcaagggcacgtgcccatctaccctgggagaggagcgctcctacaacccgttcctgagaacccactgcctggcgctacaggaggctctggggccggggccgggccccactggggatgatgactactcccgggcccagctcctggaagagctccgccggctgaaggatatgcacaagagcaagtgatgcccccagcgcccccagcccagcccactccccgcatggggaggccgccaccaccaacacctcatcatccttctcatcgctaacaccaccacctccatcggcacccaagcgggcatcatccccccacactgctcaggggaggggagggatcaggcgatgagactgtgaggccaaaagaagggggcctgttggaggctgggaaccccgcagcgcgaggctgcctcatcaacggcaagaggaaaggaggggtctcgggacatctccagaccctaccaactgggagggtcccctcctccttccctactcctgggacggcagcaaggacatgggggctgctgttagcttctccgtcaggaggcctcatctcactgtagccctggaacccagggtccatcttgcccttcccccatccatggttgggaaagaagctcagcccctcacagtggcctcaagtgtgatgccttacaaaagcaccactcagatgggcagctggactctggtgtcctgagactctgccctcttcccacagcctccctgccccacccatccctgcaaagccatttttcagacagagccattcctaagaacactgaagggctggaatgctggctggccactctctgcctcagtggcctccctacagcctggaagaaggagggtcctgattgccaaggaaacctcctcattgggctaaggagacactggagtctggagtgtggagccccacagtcttgcaggtcacatgctctccttgcacatctggcctggttgtacccactggcctctgcctctgccctgggccaaaagggcccctccttgccaggggagagacagccacggtcctctttggccgatgctgtattctcattttggcccttgttcttaggcccgtctgcccgccttcctccatctaacctttcctgttttatccgcagcccttttcttctttgagttagtaaagatttattctgtaacctgacactcatctggccctttgcagtttgccagccatattcccatgtgatttcccactggatccaggcccccatccggctggcaggagggggctctgacgtgcaggttggaaatcagaagtctgtgagagcgcgggagtgcatggcagctctgggtcccagacctggcccgacccctctgcttcacctccagctctgctgctcctctactcttgggtcgagatccctttggagccacagcgaggaaccctgtggtcctcaggcaggtgtaccttgagtcagccaggagccctcttttcctgtgtcaaagcctgccctcgggctctgctcacctctggtgaccctccaagatgcccctgccctcagtttcccctcatgatctggcctctgcccccttctctagccacagcctctagtacactttagcaataccaccagactagttagagttccccactcaccaagcaagacatgcagtttcatgcctctgtgccttcgctcatgctgtttcttccgactggaatgccttcccctgctcctcctgccttgtctgcctggcaagttcatctctcacgatcccctcaaaggccccctcctccaggaaggcaacccctgtgcccctcccctccaggctacctctgcactttgtcaatgcttctcttgtggcacttatcacactgtattttacttgtttacatgtttgtctccccttctagactgtgaatccttaagggcatggactgtatcttatgcatctctgtatttctgcgcctagcacggtgcctagcacacagtaggcgctcaataaatgttgaatgaatgaatgatttaatcaaga

SEQ ID NO: 791 - DNA, 3002 bp, Homo sapiens
  source 1..3002: mol_type = genomic DNA
cggcaggcaggttccccgcggggggccggggccgggccgttgcctagcaacgccgagccccgcccggccggcgcgtgcctgcccccagcatggcttggcagggctggcccgcggcgtggcagtgggtcgccggctgctggctcctcctcgtccttgtcctcgtcctacttgtgagcccccgcggctgccgagcgcggcggggcctccgcggtctgctcatggcgcacagccagcggctgctcttccgaatcgggtacagcctgtacacccgcacctggctcgggtacctcttctaccgacagcagctgcgcagggctcggaatcgctaccctaaaggccactcgaaaacccagccccgcctcttcaatggagtgaaggtgcttcccatccctgtcctctcggacaactacagctacctcatcatcgacacccaggcccagctggctgtggctgtggacccttcagaccctcgggctgtgcaggcttccattgaaaaggaaggggtcaccttggtcgccattctgtgtactcacaagcactgggaccacagtggagggaaccgtgacctcagccggcggcaccgggactgtcgggtgtacgggagccctcaggacggcatcccctacctcacccatcccctgtgtcatcaagatgtggtcagcgtgggacggcttcagatccgggccctggctacacctggccacacacaaggccatctggtctacctactggatggggagccctacaagggtccctcctgcctcttctcaggggacctgctcttcctctctggctgtgggcggacctttgagggcaatgcagagaccatgctgagctcactggacactgtgctggggctaggggatgacacccttctgtggcctggtcatgagtatgcagaggagaacctgggctttgcaggtgtggtggagcccgagaacctggcccgggagaggaagatgcagtgggtgcagcggcagcggctggagcgcaagggcacgtgcccatctaccctgggagaggagcgctcctacaacccgttcctgagaacccactgcctggcgctacaggaggctctggggccggggccgggccccactggggatgatgactactcccgggcccagctcctggaagagctccgccggctgaaggatatgcacaagagcaagtgatgcccccagcgcccccagcccagcccactccccgcatggggaggccgccaccaccaacacctcatcatccttctcatcgctaacaccaccacctccatcggcacccaagcgggcatcatccccccacactgctcaggggaggggagggatcaggcgatgagactgtgaggccaaaagaagggggcctgttggaggctgggaaccccgcagcgcgaggctgcctcatcaacggcaagaggaaaggaggggtctcgggacatctccagaccctaccaactgggagggtcccctcctccttccctactcctgggacggcagcaaggacatgggggctgctgttagcttctccgtcaggaggcctcatctcactgtagccctggaacccagggtccatcttgcccttcccccatccatggttgggaaagaagctcagcccctcacagtggcctcaagtgtgatgccttacaaaagcaccactcagatgggcagctggactctggtgtcctgagactctgccctcttcccacagcctccctgccccacccatccctgcaaagccatttttcagacagagccattcctaagaacactgaagggctggaatgctggctggccactctctgcctcagtggcctccctacagcctggaagaaggagggtcctgattgccaaggaaacctcctcattgggctaaggagacactggagtctggagtgtggagccccacagtcttgcaggtcacatgctctccttgcacatctggcctggttgtacccactggcctctgcctctgccctgggccaaaagggcccctccttgccaggggagagacagccacggtcctctttggccgatgctgtattctcattttggcccttgttcttaggcccgtctgcccgccttcctccatctaacctttcctgttttatccgcagcccttttcttctttgagttagtaaagatttattctgtaacctgacactcatctggccctttgcagtttgccagccatattcccatgtgatttcccactggatccaggcccccatccggctggcaggagggggctctgacgtgcaggttggaaatcagaagtctgtgagagcgcgggagtgcatggcagctctgggtcccagacctggcccgacccctctgcttcacctccagctctgctgctcctctactcttgggtcgagatccctttggagccacagcgaggaaccctgtggtcctcaggcaggtgtaccttgagtcagccaggagccctcttttcctgtgtcaaagcctgccctcgggctctgctcacctctggtgaccctccaagatgcccctgccctcagtttcccctcatgatctggcctctgcccccttctctagccacagcctctagtacactttagcaataccaccagactagttagagttccccactcaccaagcaagacatgcagtttcatgcctctgtgccttcgctcatgctgtttcttccgactggaatgccttcccctgctcctcctgccttgtctgcctggcaagttcatctctcacgatcccctcaaaggccccctcctccaggaaggcaacccctgtgcccctcccctccaggctacctctgcactttgtcaatgcttctcttgtggcacttatcacactgtattttacttgtttacatgtttgtctccccttctagactgtgaatccttaagggcatggactgtatcttatgcatctctgtatttctgcgcctagcacggtgcctagcacacagtaggcgctcaataaatgttgaatgaatgaatgatttaatcaagaaaaaaaaaaaaaaaa

SEQ ID NO: 792 - DNA, 631 bp, Homo sapiens
  source 1..631: mol_type = genomic DNA
gggggtgggatctgaacatggcggcggtggtagctgctacggcgctgaagggccggggggcgagaaatgcccgcgtcctccgggggattctcgcaggagccacagctaacaaggcttctcataacaggacccgggccctgcaaagccacagctccccagagggcaaggaggaacctgaacccctatccccggagctggaatacattcccagaaagaggggcaagaaccccatgaaagctgtgggactggcctgggccatcggcttcccttgtggtatcctcctcttcatcctcaccaagcgggaagtggacaaggaccgtgtgaagcagatgaaggctcggcagaacatgcggttgtccaacacgggcgagtatgagagccagaggttcagggcttcctcccagagtgccccgtcccctgatgttgggtctggggtgcagacctgaggagcgctgcgaccctcctaggctattgactgttaagtcctcaggtttggcccagattccagttcgtgcctctgaggtccaccagagggcgcatgaagcccaggctgttgccaaaccctaccctgccccacaccaaggagccagccaaaggcaaataaagttattgagtgtttagtagaaaggaa

SEQ ID NO: 793 - DNA, 2900 bp, Homo sapiens
  source 1..2900: mol_type = genomic DNA
gggggtgggatctgaacatggcggcggtggtagctgctacggcgctgaagggccggggggcgagaaatgcccgcgtcctccgggggattctcgcaggagccacagctaacaaggcttctcataacaggacccgggccctgcaaagccacagctccccagagggcaaggaggaacctgaacccctatccccggagctggaatacattcccagaaagaggggcaagaaccccatgaaagctgtgggactggcctggtacagcctgtacacccgcacctggctcgggtacctcttctaccgacagcagctgcgcagggctcggaatcgctaccctaaaggccactcgaaaacccagccccgcctcttcaatggagtgaaggtgcttcccatccctgtcctctcggacaactacagctacctcatcatcgacacccaggcccagctggctgtggctgtggacccttcagaccctcgggctgtgcaggcttccattgaaaaggaaggggtcaccttggtcgccattctgtgtactcacaagcactgggaccacagtggagggaaccgtgacctcagccggcggcaccgggactgtcgggtgtacgggagccctcaggacggcatcccctacctcacccatcccctgtgtcatcaagatgtggtcagcgtgggacggcttcagatccgggccctggctacacctggccacacacaaggccatctggtctacctactggatggggagccctacaagggtccctcctgcctcttctcaggggacctgctcttcctctctggctgtggtcatgagtatgcagaggagaacctgggctttgcaggtgtggtggagcccgagaacctggcccgggagaggaagatgcagtgggtgcagcggcagcggctggagcgcaagggcacgtgcccatctaccctgggagaggagcgctcctacaacccgttcctgagaacccactgcctggcgctacaggaggctctggggccggggccgggccccactggggatgatgactactcccgggcccagctcctggaagagctccgccggctgaaggatatgcacaagagcaagtgatgcccccagcgcccccagcccagcccactccccgcatggggaggccgccaccaccaacacctcatcatccttctcatcgctaacaccaccacctccatcggcacccaagcgggcatcatccccccacactgctcaggggaggggagggatcaggcgatgagactgtgaggccaaaagaagggggcctgttggaggctgggaaccccgcagcgcgaggctgcctcatcaacggcaagaggaaaggaggggtctcgggacatctccagaccctaccaactgggagggtcccctcctccttccctactcctgggacggcagcaaggacatgggggctgctgttagcttctccgtcaggaggcctcatctcactgtagccctggaacccagggtccatcttgcccttcccccatccatggttgggaaagaagctcagcccctcacagtggcctcaagtgtgatgccttacaaaagcaccactcagatgggcagctggactctggtgtcctgagactctgccctcttcccacagcctccctgccccacccatccctgcaaagccatttttcagacagagccattcctaagaacactgaagggctggaatgctggctggccactctctgcctcagtggcctccctacagcctggaagaaggagggtcctgattgccaaggaaacctcctcattgggctaaggagacactggagtctggagtgtggagccccacagtcttgcaggtcacatgctctccttgcacatctggcctggttgtacccactggcctctgcctctgccctgggccaaaagggcccctccttgccaggggagagacagccacggtcctctttggccgatgctgtattctcattttggcccttgttcttaggcccgtctgcccgccttcctccatctaacctttcctgttttatccgcagcccttttcttctttgagttagtaaagatttattctgtaacctgacactcatctggccctttgcagtttgccagccatattcccatgtgatttcccactggatccaggcccccatccggctggcaggagggggctctgacgtgcaggttggaaatcagaagtctgtgagagcgcgggagtgcatggcagctctgggtcccagacctggcccgacccctctgcttcacctccagctctgctgctcctctactcttgggtcgagatccctttggagccacagcgaggaaccctgtggtcctcaggcaggtgtaccttgagtcagccaggagccctcttttcctgtgtcaaagcctgccctcgggctctgctcacctctggtgaccctccaagatgcccctgccctcagtttcccctcatgatctggcctctgcccccttctctagccacagcctctagtacactttagcaataccaccagactagttagagttccccactcaccaagcaagacatgcagtttcatgcctctgtgccttcgctcatgctgtttcttccgactggaatgccttcccctgctcctcctgccttgtctgcctggcaagttcatctctcacgatcccctcaaaggccccctcctccaggaaggcaacccctgtgcccctcccctccaggctacctctgcactttgtcaatgcttctcttgtggcacttatcacactgtattttacttgtttacatgtttgtctccccttctagactgtgaatccttaagggcatggactgtatcttatgcatctctgtatttctgcgcctagcacggtgcctagcacacagtaggcgctcaataaatgttgaatgaatgaatgatttaatcaaga

SEQ ID NO: 794 - DNA, 2900 bp, Homo sapiens
  source 1..2900: mol_type = genomic DNA
cggcaggcaggttccccgcggggggccggggccgggccgttgcctagcaacgccgagccccgcccggccggcgcgtgcctgcccccagcatggcttggcagggctggcccgcggcgtggcagtgggtcgccggctgctggctcctcctcgtccttgtcctcgtcctacttgtgagcccccgcggctgccgagcgcggcggggcctccgcggtctgctcatggcgcacagccagcggctgctcttccgaatcgggtacagcctgtacacccgcacctggctcgggtacctcttctaccgacagcagctgcgcagggctcggaatcgctaccctaaaggccactcgaaaacccagccccgcctcttcaatggagtgaaggtgcttcccatccctgtcctctcggacaactacagctacctcatcatcgacacccaggcccagctggctgtggctgtggacccttcagaccctcgggctgtgcaggcttccattgaaaaggaaggggtcaccttggtcgccattctgtgtactcacaagcactgggaccacagtggagggaaccgtgacctcagccggcggcaccgggactgtcgggtgtacgggagccctcaggacggcatcccctacctcacccatcccctgtgtcatcaagatgtggtcagcgtgggacggcttcagatccgggccctggctacacctggccacacacaaggccatctggtctacctactggatggggagccctacaagggtccctcctgcctcttctcaggggacctgctcttcctctctggctgtggtcatgagtatgcagaggagaacctgggctttgcaggtgtggtggagcccgagaacctggcccgggagaggaagatgcagtgggtgcagcggcagcggctggagcgcaagggcacgtgcccatctaccctgggagaggagcgctcctacaacccgttcctgagaacccactgcctggcgctacaggaggctctggggccggggccgggccccactggggatgatgactactcccgggcccagctcctggaagagctccgccggctgaaggatatgcacaagagcaagtgatgcccccagcgcccccagcccagcccactccccgcatggggaggccgccaccaccaacacctcatcatccttctcatcgctaacaccaccacctccatcggcacccaagcgggcatcatccccccacactgctcaggggaggggagggatcaggcgatgagactgtgaggccaaaagaagggggcctgttggaggctgggaaccccgcagcgcgaggctgcctcatcaacggcaagaggaaaggaggggtctcgggacatctccagaccctaccaactgggagggtcccctcctccttccctactcctgggacggcagcaaggacatgggggctgctgttagcttctccgtcaggaggcctcatctcactgtagccctggaacccagggtccatcttgcccttcccccatccatggttgggaaagaagctcagcccctcacagtggcctcaagtgtgatgccttacaaaagcaccactcagatgggcagctggactctggtgtcctgagactctgccctcttcccacagcctccctgccccacccatccctgcaaagccatttttcagacagagccattcctaagaacactgaagggctggaatgctggctggccactctctgcctcagtggcctccctacagcctggaagaaggagggtcctgattgccaaggaaacctcctcattgggctaaggagacactggagtctggagtgtggagccccacagtcttgcaggtcacatgctctccttgcacatctggcctggttgtacccactggcctctgcctctgccctgggccaaaagggcccctccttgccaggggagagacagccacggtcctctttggccgatgctgtattctcattttggcccttgttcttaggcccgtctgcccgccttcctccatctaacctttcctgttttatccgcagcccttttcttctttgagttagtaaagatttattctgtaacctgacactcatctggccctttgcagtttgccagccatattcccatgtgatttcccactggatccaggcccccatccggctggcaggagggggctctgacgtgcaggttggaaatcagaagtctgtgagagcgcgggagtgcatggcagctctgggtcccagacctggcccgacccctctgcttcacctccagctctgctgctcctctactcttgggtcgagatccctttggagccacagcgaggaaccctgtggtcctcaggcaggtgtaccttgagtcagccaggagccctcttttcctgtgtcaaagcctgccctcgggctctgctcacctctggtgaccctccaagatgcccctgccctcagtttcccctcatgatctggcctctgcccccttctctagccacagcctctagtacactttagcaataccaccagactagttagagttccccactcaccaagcaagacatgcagtttcatgcctctgtgccttcgctcatgctgtttcttccgactggaatgccttcccctgctcctcctgccttgtctgcctggcaagttcatctctcacgatcccctcaaaggccccctcctccaggaaggcaacccctgtgcccctcccctccaggctacctctgcactttgtcaatgcttctcttgtggcacttatcacactgtattttacttgtttacatgtttgtctccccttctagactgtgaatccttaagggcatggactgtatcttatgcatctctgtatttctgcgcctagcacggtgcctagcacacagtaggcgctcaataaatgttgaatgaatgaatgatttaatcaaga

SEQ ID NO: 795 - DNA, 2462 bp, Homo sapiens
  source 1..2462: mol_type = genomic DNA
gagcacacgggagaggagaagagggagacccgccgcctccctccctccctagctgacttgctccctcccgggctgcggctgctgcaaaagccagcagcggcagcgggagctgtccggaggccggcgtcgagggtttgccgctgtctctgctattccatcctccccataggggctctctcccctctcccatctcaagatggcagccagcagctctgagatctctgagatgaagggggttgaggagagtcccaaggttccaggcgaagggcctggccattctgaagctgaaactggccctccccaggtcctagcaggggtaccagaccagccagaggccccgcagccaggtccaaacaccactgcggcccctgtggactcagggcccaaggctgggctggctccagaaaccacagagaccccggctggggcctcagaaacagcccaggccacagacctcagcttaagcccaggaggggaatcaaaggccaactgcagccccgaagacccatgccaagaaacagtgtccaaaccagaagtgagcaaagaggccactgcagaccaggggtccaggctggagtctgcagccccacctgaaccagccccagagcctgctccccaaccagacccccggccagattcccagcctacccccaagccagcccttcaaccagagctccctacccaggaggaccccacccctgagattctgtctgagagtgtaggggaaaagcaagagaatggggcagtggtgcccctgcaggctggtgatggggaagagggcccagcccctgagcctcactcaccaccctcaaaaaaatcccccccagccaatggggcccccccccgagtgctgcagcagctggttgaggaggatcgaatgagaagggcacacagtgggcatccaggatctccccgaggtagcctgagccgccaccccagctcccagttggcaggtcctggggtggaggggggtgaaggcacccagaaacctcgggactacatcatccttgccatcctgtcctgcttctgccccatgtggcctgtcaacatcgtggccttcgcttatgctgtcatgtcccggaacagcctgcagcagggggacgtggacggggcccagcgtctgggccgggtagccaagctcttaagcatcgtggcgctggtggggggagtcctcatcatcatcgcctcctgcgtcatcaacttaggcgtgtataagtgaggggctctgccccgcatcccaagacttttcttcctgttgggagctgccttgggcccatccctcccctggggggagcccaactgatggccctggcccccacccctaaggaccaagggagcctgagcggccttgtttacagcttctgtcctgctcctgcatcttgccaggctcctctgccaactgtaggcctgcctcatccctgcactggttccaacctccctgcactaatgcctgcatcccctccggcctcttggccccctatccctgcacttctggaaacctccctgcactctggaaacctccctgaacacctccccaactctgcgctctcagcctccctgcatctctcctggcctccctgcacttcttccagccccccaaattctctggacctccaccctggccgcctcctcccaactttcattgtcttggcatctctcaaccctcagtcctctcttccttcccttctttatcatctcccctttcctctccacgtcccgcccccttcctcttcctgcctcctcatctcccttaagcatcctcttctccaacctcccgtcaccgtttactctgcaaaattgacagcacttagacgaggcttgggggcagggagcagtgttgggagagggctccccaaccccaggctcggactgttctctgctgggaccacccagggtcggacacccaagggtgcctggcaggtcgcagagttggcaagccgggcctcgtatggggactcgggtgagggtggcgagtactggttccgaacgcacgcaggggagaagggagggacgcggcgctgacccttccaggtcagctggagttgacccgcccacctgggcttttcaaccccagtccgcgagtttctttcttgaaggtgtgggggctagattcattcacgtgcttcgtaatgaaataatccaaaaaataggaccaaagcgcccactggcaggagcgagggcggggcgccgcgctctataattattttctaagatgatgggggaggtttgttgcacgcgacagcccgctgaggaggcggggaccgagctacaacgcggttcggatttggcgggggtttttttccttaaaaaaaaaaaaaaaaaaaaaaaaaaagtctgggggaagaaaaaaactaaaattcttaaaaaaaaaaaaaaaaggctattatcaaactgatttctccctttttgtatgccggatgctgcatgagtctgaaacaccaataaacggagactgcatgaga

SEQ ID NO: 796 - DNA, 2624 bp, Homo sapiens
  source 1..2624: mol_type = genomic DNA
gagcacacgggagaggagaagagggagacccgccgcctccctccctccctagctgacttgctccctcccgggctgcggctgctgcaaaagccagcagcggcagcgggagctgtccggaggccggcgtcgagggtttgccgctgtctctgctattccatcctccccataggggctctctcccctctcccatctcaagatggcagccagcagctctgagatctctgagatgaagggggttgaggagagtcccaaggttccaggcgaagggcctggccattctgaagctgaaactggccctccccaggtcctagcaggggtaccagaccagccagaggccccgcagccaggtccaaacaccactgcggcccctgtggactcagggcccaaggctgggctggctccagaaaccacagagaccccggctggggcctcagaaacagcccaggccacagacctcagcttaagcccaggaggggaatcaaaggccaactgcagccccgaagacccatgccaagaaacagtgtccaaaccagaagtgagcaaagaggccactgcagaccaggggtccaggctggagtctgcagccccacctgaaccagccccagagcctgctccccaaccagacccccggccagattcccagcctacccccaagccagcccttcaaccagagctccctacccaggaggaccccacccctgagattctgtctgagagtgtaggggaaaagcaagagaatggggcagtggtgcccctgcaggctggtgatggggaagagggcccagcccctgagcctcactcaccaccctcaaaaaaatcccccccagccaatggggcccccccccgagtgctgcagcagctggttgaggaggatcgaatgagaagggcacacagtgggcatccaggatctccccgaggtagcctgagccgccaccccagctcccagttggcaggtcctggggtggaggggggtgaaggcacccagaaacctcgggactacatcatccttgccatcctgtcctgcttctgccccatgtggcctgtcaacatcgtggccttcgcttatgctgtcatgtcccggaacagcctgcagcagggggacgtggacggggcccagcgtctgggccgggtagccaagctcttaagcatcgtggcgctggtggggggagtcctcatcatcatcgcctcctgcgtcatcaacttaggcggtgagtgggggcttgggacaggcaggggaggaatggaagggttggcaagggcagctttactaacccctgcccctgctctctcctgtctgtcctccttacctctcctttgtctctccttgtctccccctccccccgtctgtccttccctctcctctcccacagtgtataagtgaggggctctgccccgcatcccaagacttttcttcctgttgggagctgccttgggcccatccctcccctggggggagcccaactgatggccctggcccccacccctaaggaccaagggagcctgagcggccttgtttacagcttctgtcctgctcctgcatcttgccaggctcctctgccaactgtaggcctgcctcatccctgcactggttccaacctccctgcactaatgcctgcatcccctccggcctcttggccccctatccctgcacttctggaaacctccctgcactctggaaacctccctgaacacctccccaactctgcgctctcagcctccctgcatctctcctggcctccctgcacttcttccagccccccaaattctctggacctccaccctggccgcctcctcccaactttcattgtcttggcatctctcaaccctcagtcctctcttccttcccttctttatcatctcccctttcctctccacgtcccgcccccttcctcttcctgcctcctcatctcccttaagcatcctcttctccaacctcccgtcaccgtttactctgcaaaattgacagcacttagacgaggcttgggggcagggagcagtgttgggagagggctccccaaccccaggctcggactgttctctgctgggaccacccagggtcggacacccaagggtgcctggcaggtcgcagagttggcaagccgggcctcgtatggggactcgggtgagggtggcgagtactggttccgaacgcacgcaggggagaagggagggacgcggcgctgacccttccaggtcagctggagttgacccgcccacctgggcttttcaaccccagtccgcgagtttctttcttgaaggtgtgggggctagattcattcacgtgcttcgtaatgaaataatccaaaaaataggaccaaagcgcccactggcaggagcgagggcggggcgccgcgctctataattattttctaagatgatgggggaggtttgttgcacgcgacagcccgctgaggaggcggggaccgagctacaacgcggttcggatttggcgggggtttttttccttaaaaaaaaaaaaaaaaaaaaaaaaaaagtctgggggaagaaaaaaactaaaattcttaaaaaaaaaaaaaaaaggctattatcaaactgatttctccctttttgtatgccggatgctgcatgagtctgaaacaccaataaacggagactgcatgaga

SEQ ID NO: 797 - DNA, 3051 bp, Homo sapiens
  source 1..3051: mol_type = genomic DNA
gagcacacgggagaggagaagagggagacccgccgcctccctccctccctagctgacttgctccctcccgggctgcggctgctgcaaaagccagcagcggcagcgggagctgtccggaggccggcgtcgaggtgagacccgggcagactgaggctgcggggtttgccgctgtctctgctattccatcctccccataggggctctctcccctctcccatctcaagatggcagccagcagctctgagatctctgagatgaagggggttgaggagagtcccaaggttccaggcgaagggcctggccattctgaagctgaaactggccctccccaggtcctagcaggggtaccagaccagccagaggccccgcagccaggtccaaacaccactgcggcccctgtggactcagggcccaaggctgggctggctccagaaaccacagagaccccggctggggcctcagaaacagcccaggccacagacctcagcttaagcccaggaggggaatcaaaggccaactgcagccccgaagacccatgccaagaaacagtgtccaaaccagaagtgagcaaagaggccactgcagaccaggggtccaggctggagtctgcagccccacctgaaccagccccagagcctgctccccaaccagacccccggccagattcccagcctacccccaagccagcccttcaaccagagctccctacccaggaggaccccacccctgagattctgtctgagagtgtaggggaaaagcaagagaatggggcagtggtgcccctgcaggctggtgatggggaagagggcccagcccctgagcctcactcaccaccctcaaaaaaatcccccccagccaatggggcccccccccgagtgctgcagcagctggttgaggaggatcgaatgagaagggcacacagtgggcatccaggatctccccgaggtagcctgagccgccaccccagctcccagttggcaggtcctggggtggaggggggtgaaggcacccagaaacctcgggactacatcatccttgccatcctgtcctgcttctgccccatgtggcctgtcaacatcgtggccttcgcttatgctgtcatggtgagccccatgggaccctagcccaggcctgctgtggctcccagcttcccgccagcgctgcaatagagcctctggagtaatcatgccttccttcccctctcctctctgcatggatcccacctccccaattccagggcctttgtttgcctctccctaggacctaaccctctgagccaccactgccctgcccctttgggtgggagggatatggaaacacgtgtcacacagcctcgctgacctgtgccctcctccccctgccccttcactcctccttcctcccttacccgccatctatggggctggcctctctctcttctggatgacttttccacctgatcccttctgggctggcttctcctgaccccggctatgtgcctccacccctcgccctaaccccagtcccggaacagcctgcagcagggggacgtggacggggcccagcgtctgggccgggtagccaagctcttaagcatcgtggcgctggtggggggagtcctcatcatcatcgcctcctgcgtcatcaacttaggcggtgagtgggggcttgggacaggcaggggaggaatggaagggttggcaagggcagctttactaacccctgcccctgctctctcctgtctgtcctccttacctctcctttgtctctccttgtctccccctccccccgtctgtccttccctctcctctcccacagtgtataagtgaggggctctgccccgcatcccaagacttttcttcctgttgggagctgccttgggcccatccctcccctggggggagcccaactgatggccctggcccccacccctaaggaccaagggagcctgagcggccttgtttacagcttctgtcctgctcctgcatcttgccaggctcctctgccaactgtaggcctgcctcatccctgcactggttccaacctccctgcactaatgcctgcatcccctccggcctcttggccccctatccctgcacttctggaaacctccctgcactctggaaacctccctgaacacctccccaactctgcgctctcagcctccctgcatctctcctggcctccctgcacttcttccagccccccaaattctctggacctccaccctggccgcctcctcccaactttcattgtcttggcatctctcaaccctcagtcctctcttccttcccttctttatcatctcccctttcctctccacgtcccgcccccttcctcttcctgcctcctcatctcccttaagcatcctcttctccaacctcccgtcaccgtttactctgcaaaattgacagcacttagacgaggcttgggggcagggagcagtgttgggagagggctccccaaccccaggctcggactgttctctgctgggaccacccagggtcggacacccaagggtgcctggcaggtcgcagagttggcaagccgggcctcgtatggggactcgggtgagggtggcgagtactggttccgaacgcacgcaggggagaagggagggacgcggcgctgacccttccaggtcagctggagttgacccgcccacctgggcttttcaaccccagtccgcgagtttctttcttgaaggtgtgggggctagattcattcacgtgcttcgtaatgaaataatccaaaaaataggaccaaagcgcccactggcaggagcgagggcggggcgccgcgctctataattattttctaagatgatgggggaggtttgttgcacgcgacagcccgctgaggaggcggggaccgagctacaacgcggttcggatttggcgggggtttttttccttaaaaaaaaaaaaaaaaaaaaaaaaaaagtctgggggaagaaaaaaactaaaattcttaaaaaaaaaaaaaaaaggctattatcaaactgatttctccctttttgtatgccggatgctgcatgagtctgaaacaccaataaacggagactgcatgaga

SEQ ID NO: 798 - DNA, 2652 bp, Homo sapiens
  source 1..2652: mol_type = genomic DNA
gagcacacgggagaggagaagagggagacccgccgcctccctccctccctagctgacttgctccctcccgggctgcggctgctgcaaaagccagcagcggcagcgggagctgtccggaggccggcgtcgaggtgagacccgggcagactgaggctgcggggtttgccgctgtctctgctattccatcctccccataggggctctctcccctctcccatctcaagatggcagccagcagctctgagatctctgagatgaagggggttgaggagagtcccaaggttccaggcgaagggcctggccattctgaagctgaaactggccctccccaggtcctagcaggggtaccagaccagccagaggccccgcagccaggtccaaacaccactgcggcccctgtggactcagggcccaaggctgggctggctccagaaaccacagagaccccggctggggcctcagaaacagcccaggccacagacctcagcttaagcccaggaggggaatcaaaggccaactgcagccccgaagacccatgccaagaaacagtgtccaaaccagaagtgagcaaagaggccactgcagaccaggggtccaggctggagtctgcagccccacctgaaccagccccagagcctgctccccaaccagacccccggccagattcccagcctacccccaagccagcccttcaaccagagctccctacccaggaggaccccacccctgagattctgtctgagagtgtaggggaaaagcaagagaatggggcagtggtgcccctgcaggctggtgatggggaagagggcccagcccctgagcctcactcaccaccctcaaaaaaatcccccccagccaatggggcccccccccgagtgctgcagcagctggttgaggaggatcgaatgagaagggcacacagtgggcatccaggatctccccgaggtagcctgagccgccaccccagctcccagttggcaggtcctggggtggaggggggtgaaggcacccagaaacctcgggactacatcatccttgccatcctgtcctgcttctgccccatgtggcctgtcaacatcgtggccttcgcttatgctgtcatgtcccggaacagcctgcagcagggggacgtggacggggcccagcgtctgggccgggtagccaagctcttaagcatcgtggcgctggtggggggagtcctcatcatcatcgcctcctgcgtcatcaacttaggcggtgagtgggggcttgggacaggcaggggaggaatggaagggttggcaagggcagctttactaacccctgcccctgctctctcctgtctgtcctccttacctctcctttgtctctccttgtctccccctccccccgtctgtccttccctctcctctcccacagtgtataagtgaggggctctgccccgcatcccaagacttttcttcctgttgggagctgccttgggcccatccctcccctggggggagcccaactgatggccctggcccccacccctaaggaccaagggagcctgagcggccttgtttacagcttctgtcctgctcctgcatcttgccaggctcctctgccaactgtaggcctgcctcatccctgcactggttccaacctccctgcactaatgcctgcatcccctccggcctcttggccccctatccctgcacttctggaaacctccctgcactctggaaacctccctgaacacctccccaactctgcgctctcagcctccctgcatctctcctggcctccctgcacttcttccagccccccaaattctctggacctccaccctggccgcctcctcccaactttcattgtcttggcatctctcaaccctcagtcctctcttccttcccttctttatcatctcccctttcctctccacgtcccgcccccttcctcttcctgcctcctcatctcccttaagcatcctcttctccaacctcccgtcaccgtttactctgcaaaattgacagcacttagacgaggcttgggggcagggagcagtgttgggagagggctccccaaccccaggctcggactgttctctgctgggaccacccagggtcggacacccaagggtgcctggcaggtcgcagagttggcaagccgggcctcgtatggggactcgggtgagggtggcgagtactggttccgaacgcacgcaggggagaagggagggacgcggcgctgacccttccaggtcagctggagttgacccgcccacctgggcttttcaaccccagtccgcgagtttctttcttgaaggtgtgggggctagattcattcacgtgcttcgtaatgaaataatccaaaaaataggaccaaagcgcccactggcaggagcgagggcggggcgccgcgctctataattattttctaagatgatgggggaggtttgttgcacgcgacagcccgctgaggaggcggggaccgagctacaacgcggttcggatttggcgggggtttttttccttaaaaaaaaaaaaaaaaaaaaaaaaaaagtctgggggaagaaaaaaactaaaattcttaaaaaaaaaaaaaaaaggctattatcaaactgatttctccctttttgtatgccggatgctgcatgagtctgaaacaccaataaacggagactgcatgaga

SEQ ID NO: 799 - DNA, 1254 bp, Homo sapiens
  source 1..1254: mol_type = genomic DNA
gagcacacgggagaggagaagagggagacccgccgcctccctccctccctagctgacttgctccctcccgggctgcggctgctgcaaaagccagcagcggcagcgggagctgtccggaggccggcgtcgagggtttgccgctgtctctgctattccatcctccccataggggctctctcccctctcccatctcaagatggcagccagcagctctgagatctctgagatgaagggggttgaggagagtcccaaggttccaggcgaagggcctggccattctgaagctgaaactggccctccccaggtcctagcaggggtaccagaccagccagaggccccgcagccaggtccaaacaccactgcggcccctgtggactcagggcccaaggctgggctggctccagaaaccacagagaccccggctggggcctcagaaacagcccaggccacagacctcagcttaagcccaggaggggaatcaaaggccaactgcagccccgaagacccatgccaagaaacagtgtccaaaccagaagtgagcaaagaggccactgcagaccaggggtccaggctggagtctgcagccccacctgaaccagccccagagcctgctccccaaccagacccccggccagattcccagcctacccccaagccagcccttcaaccagagctccctacccaggaggaccccacccctgagattctgtctgagagtgtaggggaaaagcaagagaatggggcagtggtgcccctgcaggctggtgatggggaagagggcccagcccctgagcctcactcaccaccctcaaaaaaatcccccccagccaatggggcccccccccgagtgctgcagcagctggttgaggaggatcgaatgagaagggcacacagtgggcatccaggatctccccgaggtagcctgagccgccaccccagctcccagttggcaggtcctggggtggaggggggtgaaggcacccagaaacctcgggactacatcatccttgccatcctgtcctgcttctgccccatgtggcctgtcaacatcgtggccttcgcttatgctgtcatgtcccggaacagcctgcagcagggggacgtggacggggcccagcgtctgggccgggtagccaagctcttaagcatcgtggcgctggtggggggagtcctcatcatcatcgcctcctgcgtcatcaacttaggcggatgctgcatgagtctgaaacaccaataaacggagactgcatgaga

SEQ ID NO: 800 - DNA, 2490 bp, Homo sapiens
  source 1..2490: mol_type = genomic DNA
gagcacacgggagaggagaagagggagacccgccgcctccctccctccctagctgacttgctccctcccgggctgcggctgctgcaaaagccagcagcggcagcgggagctgtccggaggccggcgtcgaggtgagacccgggcagactgaggctgcggggtttgccgctgtctctgctattccatcctccccataggggctctctcccctctcccatctcaagatggcagccagcagctctgagatctctgagatgaagggggttgaggagagtcccaaggttccaggcgaagggcctggccattctgaagctgaaactggccctccccaggtcctagcaggggtaccagaccagccagaggccccgcagccaggtccaaacaccactgcggcccctgtggactcagggcccaaggctgggctggctccagaaaccacagagaccccggctggggcctcagaaacagcccaggccacagacctcagcttaagcccaggaggggaatcaaaggccaactgcagccccgaagacccatgccaagaaacagtgtccaaaccagaagtgagcaaagaggccactgcagaccaggggtccaggctggagtctgcagccccacctgaaccagccccagagcctgctccccaaccagacccccggccagattcccagcctacccccaagccagcccttcaaccagagctccctacccaggaggaccccacccctgagattctgtctgagagtgtaggggaaaagcaagagaatggggcagtggtgcccctgcaggctggtgatggggaagagggcccagcccctgagcctcactcaccaccctcaaaaaaatcccccccagccaatggggcccccccccgagtgctgcagcagctggttgaggaggatcgaatgagaagggcacacagtgggcatccaggatctccccgaggtagcctgagccgccaccccagctcccagttggcaggtcctggggtggaggggggtgaaggcacccagaaacctcgggactacatcatccttgccatcctgtcctgcttctgccccatgtggcctgtcaacatcgtggccttcgcttatgctgtcatgtcccggaacagcctgcagcagggggacgtggacggggcccagcgtctgggccgggtagccaagctcttaagcatcgtggcgctggtggggggagtcctcatcatcatcgcctcctgcgtcatcaacttaggcgtgtataagtgaggggctctgccccgcatcccaagacttttcttcctgttgggagctgccttgggcccatccctcccctggggggagcccaactgatggccctggcccccacccctaaggaccaagggagcctgagcggccttgtttacagcttctgtcctgctcctgcatcttgccaggctcctctgccaactgtaggcctgcctcatccctgcactggttccaacctccctgcactaatgcctgcatcccctccggcctcttggccccctatccctgcacttctggaaacctccctgcactctggaaacctccctgaacacctccccaactctgcgctctcagcctccctgcatctctcctggcctccctgcacttcttccagccccccaaattctctggacctccaccctggccgcctcctcccaactttcattgtcttggcatctctcaaccctcagtcctctcttccttcccttctttatcatctcccctttcctctccacgtcccgcccccttcctcttcctgcctcctcatctcccttaagcatcctcttctccaacctcccgtcaccgtttactctgcaaaattgacagcacttagacgaggcttgggggcagggagcagtgttgggagagggctccccaaccccaggctcggactgttctctgctgggaccacccagggtcggacacccaagggtgcctggcaggtcgcagagttggcaagccgggcctcgtatggggactcgggtgagggtggcgagtactggttccgaacgcacgcaggggagaagggagggacgcggcgctgacccttccaggtcagctggagttgacccgcccacctgggcttttcaaccccagtccgcgagtttctttcttgaaggtgtgggggctagattcattcacgtgcttcgtaatgaaataatccaaaaaataggaccaaagcgcccactggcaggagcgagggcggggcgccgcgctctataattattttctaagatgatgggggaggtttgttgcacgcgacagcccgctgaggaggcggggaccgagctacaacgcggttcggatttggcgggggtttttttccttaaaaaaaaaaaaaaaaaaaaaaaaaaagtctgggggaagaaaaaaactaaaattcttaaaaaaaaaaaaaaaaggctattatcaaactgatttctccctttttgtatgccggatgctgcatgagtctgaaacaccaataaacggagactgcatgaga

SEQ ID NO: 801 - DNA, 1253 bp, Homo sapiens
  source 1..1253: mol_type = genomic DNA
gagcacacgggagaggagaagagggagacccgccgcctccctccctccctagctgacttgctccctcccgggctgcggctgctgcaaaagccagcagcggcagcgggagctgtccggaggccggcgtcgagggtttgccgctgtctctgctattccatcctccccataggggctctctcccctctcccatctcaagatggcagccagcagctctgagatctctgagatgaagggggttgaggagagtcccaaggttccaggcgaagggcctggccattctgaagctgaaactggccctccccaggtcctagcaggggtaccagaccagccagaggccccgcagccaggtccaaacaccactgcggcccctgtggactcagggcccaaggctgggctggctccagaaaccacagagaccccggctggggcctcagaaacagcccaggccacagacctcagcttaagcccaggaggggaatcaaaggccaactgcagccccgaagacccatgccaagaaacagtgtccaaaccagaagtgagcaaagaggccactgcagaccaggggtccaggctggagtctgcagccccacctgaaccagccccagagcctgctccccaaccagacccccggccagattcccagcctacccccaagccagcccttcaaccagagctccctacccaggaggaccccacccctgagattctgtctgagagtgtaggggaaaagcaagagaatggggcagtggtgcccctgcaggctggtgatggggaagagggcccagcccctgagcctcactcaccaccctcaaaaaaatcccccccagccaatggggcccccccccgagtgctgcagcagctggttgaggaggatcgaatgagaagggcacacagtgggcatccaggatctccccgaggtagcctgagccgccaccccagctcccagttggcaggtcctggggtggaggggggtgaaggcacccagaaacctcgggactacatcatccttgccatcctgtcctgcttctgccccatgtggcctgtcaacatcgtggccttcgcttatgctgtcatgtcccggaacagcctgcagcagggggacgtggacggggcccagcgtctgggccgggtagccaagctcttaagcatcgtggcgctggtggggggagtcctcatcatcatcgcctcctgcgtcatcaacttaggcgatgctgcatgagtctgaaacaccaataaacggagactgcatgaga

SEQ ID NO: 802 - DNA, 3384 bp, Homo sapiens
  source 1..3384: mol_type = genomic DNA
aagaggcaagaggtagcaacagcgagcgtgccggtcgctagtcgcgggtccccgagtgagcacgccagggagcaggagaccaaacgacgggggtcggagtcagagtcgcagtgggagtccccggaccggagcacgagcctgagcgggagagcgccgctcgcacgcccgtcgccacccgcgtacccggcgcagccagagccaccagcgcagcgctgccatggagcccagcagcaagaagctgacgggtcgcctcatgctggccgtgggaggagcagtgcttggctccctgcagtttggctacaacactggagtcatcaatgccccccagaaggtgatcgaggagttctacaaccagacatgggtccaccgctatggggagagcatcctgcccaccacgctcaccacgctctggtccctctcagtggccatcttttctgttgggggcatgattggctccttctctgtgggccttttcgttaaccgctttggccggcggaattcaatgctgatgatgaacctgctggccttcgtgtccgccgtgctcatgggcttctcgaaactgggcaagtcctttgagatgctgatcctgggccgcttcatcatcggtgtgtactgcggcctgaccacaggcttcgtgcccatgtatgtgggtgaagtgtcacccacagcccttcgtggggccctgggcaccctgcaccagctgggcatcgtcgtcggcatcctcatcgcccaggtgttcggcctggactccatcatgggcaacaaggacctgtggcccctgctgctgagcatcatcttcatcccggccctgctgcagtgcatcgtgctgcccttctgccccgagagtccccgcttcctgctcatcaaccgcaacgaggagaaccgggccaagagtgtgctaaagaagctgcgcgggacagctgacgtgacccatgacctgcaggagatgaaggaagagagtcggcagatgatgcgggagaagaaggtcaccatcctggagctgttccgctcccccgcctaccgccagcccatcctcatcgctgtggtgctgcagctgtcccagcagctgtctggcatcaacgctgtcttctattactccacgagcatcttcgagaaggcgggggtgcagcagcctgtgtatgccaccattggctccggtatcgtcaacacggccttcactgtcgtgtcgctgtttgtggtggagcgagcaggccggcggaccctgcacctcataggcctcgctggcatggcgggttgtgccatactcatgaccatcgcgctagcactgctggagcagctaccctggatgtcctatctgagcatcgtggccatctttggctttgtggccttctttgaagtgggtcctggccccatcccatggttcatcgtggctgaactcttcagccagggtccacgtccagctgccattgccgttgcaggcttctccaactggacctcaaatttcattgtgggcatgtgcttccagtatgtggagcaactgtgtggtccctacgtcttcatcatcttcactgtgctcctggttctgttcttcatcttcacctacttcaaagttcctgagactaaaggccggaccttcgatgagatcgcttccggcttccggcaggggggagccagccaaagtgacaagacacccgaggagctgttccatcccctgggggctgattcccaagtgtgagtcgccccagatcaccagcccggcctgctcccagcagccctaaggatctctcaggagcacaggcagctggatgagacttccaaacctgacagatgtcagccgagccgggcctggggctcctttctccagccagcaatgatgtccagaagaatattcaggacttaacggctccaggattttaacaaaagcaagactgttgctcaaatctattcagacaagcaacaggttttataatttttttattactgattttgttatttttatatcagcctgagtctcctgtgcccacatcccaggcttcaccctgaatggttccatgcctgagggtggagactaagccctgtcgagacacttgccttcttcacccagctaatctgtagggctggacctatgtcctaaggacacactaatcgaactatgaactacaaagcttctatcccaggaggtggctatggccacccgttctgctggcctggatctccccactctaggggtcaggctccattaggatttgccccttcccatctcttcctacccaaccactcaaattaatctttctttacctgagaccagttgggagcactggagtgcagggaggagaggggaagggccagtctgggctgccgggttctagtctcctttgcactgagggccacactattaccatgagaagagggcctgtgggagcctgcaaactcactgctcaagaagacatggagactcctgccctgttgtgtatagatgcaagatatttatatatatttttggttgtcaatattaaatacagacactaagttatagtatatctggacaagccaacttgtaaatacaccacctcactcctgttacttacctaaacagatataaatggctggtttttagaaacatggttttgaaatgcttgtggattgagggtaggaggtttggatgggagtgagacagaagtaagtggggttgcaaccactgcaacggcttagacttcgactcaggatccagtcccttacacgtacctctcatcagtgtcctcttgctcaaaaatctgtttgatccctgttacccagagaatatatacattctttatcttgacattcaaggcatttctatcacatatttgatagttggtgttcaaaaaaacactagttttgtgccagccgtgatgctcaggcttgaaatgcattattttgaatgtgaagtaaatactgtacctttattggacaggctcaaagaggttatgtgcctgaagtcgcacagtgaataagctaaaacacctgcttttaacaatggtaccatacaaccactactccattaactccacccacctcctgcacccctccccacacacacaaaatgaaccacgttctttgtatgggcccaatgagctgtcaagctgccctgtgttcatttcatttggaattgccccctctggttcctctgtatactactgcttcatctctaaagacagctcatcctcctccttcacccctgaatttccagagcacttcatctgctccttcatcacaagtccagttttctgccactagtctgaatttcatgagaagatgccgatttggttcctgtgggtcctcagcactattcagtacagtgcttgatgcacagcaggcactcagaaaatactggaggaaataaaacaccaaagatatttgtctctagaggctcagctgacaaaa

SEQ ID NO: 803 - DNA, 1277 bp, Homo sapiens
  source 1..1277: mol_type = genomic DNA
gggcgaggagtccagagagccatggccgccctgcgtgtcctgctgtcctgcgtccgcggcccgctgaggcccccggttcgctgtcccgcctggcgtcccttcgcctcgggtgctaactttgagtacatcatcgcagaaaaaagagggaagaataacaccgtggggttgatccaactgaaccgccccaaggccctcaatgcactttgcgatggcctgattgacgagctcaaccaggccctgaagaccttcgaggaggacccggccgtgggggccattgtcctcaccggcggggataaggcctttgcagctggagctgatatcaaggaaatgcagaacctgagtttccaggactgttactccagcaagttcttgaagcactgggaccacctcacccaggtcaagaagccagtcatcgctgctgtcaatggctatgcctttggcgggggctgtgagcttgccatgatgtgtgatatcatctatgccggtgagaaggcccagtttgcacagccggagatcttaataggaaccatcccaggtgcgggcggcacccagagactcacccgtgctgttgggaagtcgctggcgatggagatggtcctcactggtgaccggatctcagcccaggacgccaagcaagcaggtcttgtcagcaagatttgtcctgttgagacactggtggaagaagccatccagtgtgcagaaaaaattgccagcaattctaaaattgtagtagcgatggccaaagaatcagtgaatgcagcttttgaaatgacattaacagaaggaagtaagttggagaagaaactcttttattcaacctttgccactgatgaccggaaagaagggatgaccgcgtttgtggaaaagagaaaggccaacttcaaagaccagtgagaaccagctgcccctgcttcacacctctgcttggagaggacaagtgcagcctgtcagttttagaagcaagtaaatcatcctcttttcaagagcagtgtccgtggtgtgcagttcctctccaattgctgcgtggtcgtggcccgacctctcacggcatgacagccttcgtcacccagcctgtgagggtcctgactggagcaccttctaaatctaagattctgctgaggagcccccgctggtccctctgggcatgctgtgctcggacggaaagcggggcctgcgggtccttgtgtccctgccgctgaagaatggggctgctctgagggaaacgctgtctgctgccttcatacagatgctgattaaagtgatagcgattcagatta

SEQ ID NO: 804 - RNA, 16 nt, synthetic construct
  source 1..16: mol_type = other RNA
  modified_base 6: mod_base = OTHER; note = Thymine
  modified_base 8: mod_base = OTHER; note = Thymine
  modified_base 12: mod_base = OTHER; note = Thymine
gcacgtgtggctcaag

SEQ ID NO: 805 - RNA, 16 nt, synthetic construct
  source 1..16: mol_type = other RNA
  modified_base 10: mod_base = OTHER; note = Thymine
accaacacgtccctct

SEQ ID NO: 806 - RNA, 16 nt, synthetic construct
  source 1..16: mol_type = other RNA
  modified_base 7: mod_base = OTHER; note = Thymine
cccggatcacaggact

SEQ ID NO: 807 - protein, 4 aa, synthetic construct
  SITE 1: note = modified by (1,1-dimethylethoxy) carbonyl
  SITE 2: note = modified by O-toluylaminocarbonyl
  SITE 4: note = modified by N-methyl
  SITE 4: note = modified by amide
WKDF

SEQ ID NO: 808 - protein, 2009 aa, synthetic construct
MEQTVLVPPGPDSFNFFTRESLAAIERRIAEEKAKNPKPDKKDDDENGPKPNSDLEAGKNLPFIYGDIPPEMVSEPLEDLDPYYINKKTFIVLNKGKAIFRFSATSALYILTPFNPLRKIAIKILVHSLFSMLIMCTILTNCVFMTMSNPPDWTKNVEYTFTGIYTFESLIKIIARGFCLEDFTFLRDPWNWLDFTVITFAYVTEFVDLGNVSALRTFRVLRALKTISVIPGLKTIVGALIQSVKKLSDVMILTVFCLSVFALIGLQLFMGNLRNKCIQWPPTNASLEEHSIEKNITVNYNGTLINETVFEFDWKSYIQDSRYHYFLEGFLDALLCGNSSDAGQCPEGYMCVKAGRNPNYGYTSFDTFSWAFLSLFRLMTQDFWENLYQLTLRAAGKTYMIFFVLVIFLGSFYLINLILAVVAMAYEEQNQATLEEAEQKEAEFQQMIEQLKKQQEAAQQAATATASEHSREPSAAGRLSDSSSEASKLSSKSAKERRNRRKKRKQKEQSGGEEKDEDEFQKSESEDSIRRKGFRFSIEGNRLTYEKRYSSPHQSLLSIRGSLFSPRRNSRTSLFSFRGRAKDVGSENDFADDEHSTFEDNESRRDSLFVPRRHGERRNSNLSQTSRSSRMLAVFPANGKMHSTVDCNGVVSLVGGPSVPTSPVGQLLPEVIIDKPATDDNGTTTETEMRKRRSSSFHVSMDFLEDPSQRQRAMSIASILTNTVEELEESRQKCPPCWYKFSNIFLIWDCSPYWLKVKHVVNLVVMDPFVDLAITICIVLNTLFMAMEHYPMTDHFNNVLTVGNLVFTGIFTAEMFLKIIAMDPYYYFQEGWNIFDGFIVTLSLVELGLANVEGLSVLRSFRLLRVFKLAKSWPTLNMLIKIIGNSVGALGNLTLVLAIIVFIFAVVGMQLFGKSYKDCVCKIASDCQLPRWHMNDFFHSFLIVFRVLCGEWIETMWDCMEVAGQAMCLTVFMMVMVIGNLVVLNLFLALLLSSFSADNLAATDDDNEMNNLQIAVDRMHKGVAYVKRKIYEFIQQSFIRKQKILDEIKPLDDLNNKKDSCMSNHTAEIGKDLDYLKDVNGTTSGIGTGSSVEKYIIDESDYMSFINNPSLTVTVPIAVGESDFENLNTEDFSSESDLEESKEKLNESSSSSEGSTVDIGAPVEEQPVVEPEETLEPEACFTEGCVQRFKCCQINVEEGRGKQWWNLRRTCFRIVEHNWFETFIVFMILLSSGALAFEDIYIDQRKTIKTMLEYADKVFTYIFILEMLLKWVAYGYQTYFTNAWCWLDFLIVDVSLVSLTANALGYSELGAIKSLRTLRALRPLRALSRFEGMRVVVNALLGAIPSIMNVLLVCLIFWLIFSIMGVNLFAGKFYHCINTTTGDRFDIEDVNNHTDCLKLIERNETARWKNVKVNFDNVGFGYLSLLQVATFKGWMDIMYAAVDSRNVELQPKYEESLYMYLYFVIFIIFGSFFTLNLFIGVIIDNFNQQKKKFGGQDIFMTEEQKKYYNAMKKLGSKKPQKPIPRPGNKFQGMVFDFVTRQVFDISIMILICLNMVTMMVETDDQSEYVTTILSRINLVFIVLFTGECVLKLISLRHYYFTIGWNIFDFVVVILSIVGMFLAELIEKYFVSPTLFRVIRLARIGRILRLIKGAKGIRTLLFALMMSLPALFNIGLLLFLVMFIYAIFGMSNFAYVKREVGIDDMFNFETFGNSMICLFQITTSAGWDGLLAPILNSKPPDCDPNKVNPGSSVKGDCGNPSVGIFFFVSYIIISFLVVVNMYIAVILENFSVATEESAEPLSEDDFEMFYEVWEKFDPDATQFMEFEKLSQFAAALEPPLNLPQPNKLQLIAMDLPMVSGDRIHCLDILFAFTKRVLGESGEMDALRIQMEERFMASNPSKVSYQPITTTLKRKQEEVSAVIIQRAYRRHLLKRTVKQASFTYNKNKIKGGANLLIKEDMIIDRINENSITEKTDLTMSTAACPPSYDRVTKPIVEKHEQEGKDEKAKGK

SEQ ID NO: 809 - DNA, 6030 bp, synthetic construct
  source 1..6030: mol_type = other DNA
atggagcaaacagtgcttgtaccaccaggacctgacagcttcaacttcttcaccagagaatctcttgcggctattgaaagacgcattgcagaagaaaaggcaaagaatcccaaaccagacaaaaaagatgacgacgaaaatggcccaaagccaaatagtgacttggaagctggaaagaaccttccatttatttatggagacattcctccagagatggtgtcagagcccctggaggacctggacccctactatatcaataagaaaacttttatagtattgaataaagggaaggccatcttccggttcagtgccacctctgccctgtacattttaactcccttcaatcctcttaggaaaatagctattaagattttggtacattcattattcagcatgctaattatgtgcactattttgacaaactgtgtgtttatgacaatgagtaaccctcctgattggacaaagaatgtagaatacaccttcacaggaatatatacttttgaatcacttataaaaattattgcaaggggattctgtttagaagattttactttccttcgggatccatggaactggctcgatttcactgtcattacatttgcgtacgtcacagagtttgtggacctgggcaatgtctcggcattgagaacattcagagttctccgagcattgaagacgatttcagtcattccaggcctgaaaaccattgtgggagccctgatccagtctgtgaagaagctctcagatgtaatgatcctgactgtgttctgtctgagcgtatttgctctaattgggctgcagctgttcatgggcaacctgaggaataaatgtatacaatggcctcccaccaatgcttccttggaggaacatagtatagaaaagaatataactgtgaattataatggtacacttataaatgaaactgtctttgagtttgactggaagtcatatattcaagattcaagatatcattatttcctggagggttttttagatgcactactatgtggaaatagctctgatgcaggccaatgtccagagggatatatgtgtgtgaaagctggtagaaatcccaattatggctacacaagctttgataccttcagttgggcttttttgtccttgtttcgactaatgactcaggacttctgggaaaatctttatcaactgacattacgtgctgctgggaaaacgtacatgatattttttgtattggtcattttcttgggctcattctacctaataaatttgatcctggctgtggtggccatggcctacgaggaacagaatcaggccaccttggaagaagcagaacagaaagaggccgaatttcagcagatgattgaacagcttaaaaagcaacaggaggcagctcagcaggcagcaacggcaactgcctcagaacattccagagagcccagtgcagcaggcaggctctcagacagctcatctgaagcctctaagttgagttccaagagtgctaaggaaagaagaaatcggaggaagaaaagaaaacagaaagagcagtctggtggggaagagaaagatgaggatgaattccaaaaatctgaatctgaggacagcatcaggaggaaaggttttcgcttctccattgaagggaaccgattgacatatgaaaagaggtactcctccccacaccagtctttgttgagcatccgtggctccctattttcaccaaggcgaaatagcagaacaagccttttcagctttagagggcgagcaaaggatgtgggatctgagaacgacttcgcagatgatgagcacagcacctttgaggataacgagagccgtagagattccttgtttgtgccccgacgacacggagagagacgcaacagcaacctgagtcagaccagtaggtcatcccggatgctggcagtgtttccagcgaatgggaagatgcacagcactgtggattgcaatggtgtggtttccttggttggtggaccttcagttcctacatcgcctgttggacagcttctgccagaggtgataatagataagccagctactgatgacaatggaacaaccactgaaactgaaatgagaaagagaaggtcaagttctttccacgtttccatggactttctagaagatccttcccaaaggcaacgagcaatgagtatagccagcattctaacaaatacagtagaagaacttgaagaatccaggcagaaatgcccaccctgttggtataaattttccaacatattcttaatctgggactgttctccatattggttaaaagtgaaacatgttgtcaacctggttgtgatggacccatttgttgacctggccatcaccatctgtattgtcttaaatactcttttcatggccatggagcactatccaatgacggaccatttcaataatgtgcttacagtaggaaacttggttttcactgggatctttacagcagaaatgtttctgaaaattattgccatggatccttactattatttccaagaaggctggaatatctttgacggttttattgtgacgcttagcctggtagaacttggactcgccaatgtggaaggattatctgttctccgttcatttcgattgctgcgagttttcaagttggcaaaatcttggccaacgttaaatatgctaataaagatcatcggcaattccgtgggggctctgggaaatttaaccctcgtcttggccatcatcgtcttcatttttgccgtggtcggcatgcagctctttggtaaaagctacaaagattgtgtctgcaagatcgccagtgattgtcaactcccacgctggcacatgaatgacttcttccactccttcctgattgtgttccgcgtgctgtgtggggagtggatagagaccatgtgggactgtatggaggttgctggtcaagccatgtgccttactgtcttcatgatggtcatggtgattggaaacctagtggtcctgaatctctttctggccttgcttctgagctcatttagtgcagacaaccttgcagccactgatgatgataatgaaatgaataatctccaaattgctgtggataggatgcacaaaggagtagcttatgtgaaaagaaaaatatatgaatttattcaacagtccttcattaggaaacaaaagattttagatgaaattaaaccacttgatgatctaaacaacaagaaagacagttgtatgtccaatcatacagcagaaattgggaaagatcttgactatcttaaagatgtaaatggaactacaagtggtataggaactggcagcagtgttgaaaaatacattattgatgaaagtgattacatgtcattcataaacaaccccagtcttactgtgactgtaccaattgctgtaggagaatctgactttgaaaatttaaacacggaagactttagtagtgaatcggatctggaagaaagcaaagagaaactgaatgaaagcagtagctcatcagaaggtagcactgtggacatcggcgcacctgtagaagaacagcccgtagtggaacctgaagaaactcttgaaccagaagcttgtttcactgaaggctgtgtacaaagattcaagtgttgtcaaatcaatgtggaagaaggcagaggaaaacaatggtggaacctgagaaggacgtgtttccgaatagttgaacataactggtttgagaccttcattgttttcatgattctccttagtagtggtgctctggcatttgaagatatatatattgatcagcgaaagacgattaagacgatgttggaatatgctgacaaggttttcacttacattttcattctggaaatgcttctaaaatgggtggcatatggctatcaaacatatttcaccaatgcctggtgttggctggacttcttaattgttgatgtttcattggtcagtttaacagcaaatgccttgggttactcagaacttggagccatcaaatctctcaggacactaagagctctgagacctctaagagccttatctcgatttgaagggatgagggtggttgtgaatgcccttttaggagcaattccatccatcatgaatgtgcttctggtttgtcttatattctggctaattttcagcatcatgggcgtaaatttgtttgctggcaaattctaccactgtattaacaccacaactggtgacaggtttgacatcgaagacgtgaataatcatactgattgcctaaaactaatagaaagaaatgagactgctcgatggaaaaatgtgaaagtaaactttgataatgtaggatttgggtatctctctttgcttcaagttgccacattcaaaggatggatggatataatgtatgcagcagttgattccagaaatgtggaactccagcctaagtatgaagaaagtctgtacatgtatctttactttgttattttcatcatctttgggtccttcttcaccttgaacctgtttattggtgtcatcatagataatttcaaccagcagaaaaagaagtttggaggtcaagacatctttatgacagaagaacagaagaaatactataatgcaatgaaaaaattaggatcgaaaaaaccgcaaaagcctatacctcgaccaggaaacaaatttcaaggaatggtctttgacttcgtaaccagacaagtttttgacataagcatcatgattctcatctgtcttaacatggtcacaatgatggtggaaacagatgaccagagtgaatatgtgactaccattttgtcacgcatcaatctggtgttcattgtgctatttactggagagtgtgtactgaaactcatctctctacgccattattattttaccattggatggaatatttttgattttgtggttgtcattctctccattgtaggtatgtttcttgccgagctgatagaaaagtatttcgtgtcccctaccctgttccgagtgatccgtcttgctaggattggccgaatcctacgtctgatcaaaggagcaaaggggatccgcacgctgctctttgctttgatgatgtcccttcctgcgttgtttaacatcggcctcctactcttcctagtcatgttcatctacgccatctttgggatgtccaactttgcctatgttaagagggaagttgggatcgatgacatgttcaactttgagacctttggcaacagcatgatctgcctattccaaattacaacctctgctggctgggatggattgctagcacccattctcaacagtaagccacccgactgtgaccctaataaagttaaccctggaagctcagttaagggagactgtgggaacccatctgttggaattttcttttttgtcagttacatcatcatatccttcctggttgtggtgaacatgtacatcgcggtcatcctggagaacttcagtgttgctactgaagaaagtgcagagcctctgagtgaggatgactttgagatgttctatgaggtttgggagaagtttgatcccgatgcaactcagttcatggaatttgaaaaattatctcagtttgcagctgcgcttgaaccgcctctcaatctgccacaaccaaacaaactccagctcattgccatggatttgcccatggtgagtggtgaccggatccactgtcttgatatcttatttgcttttacaaagcgggttctaggagagagtggagagatggatgctctacgaatacagatggaagagcgattcatggcttccaatccttccaaggtctcctatcagccaatcactactactttaaaacgaaaacaagaggaagtatctgctgtcattattcagcgtgcttacagacgccaccttttaaagcgaactgtaaaacaagcttcctttacgtacaataaaaacaaaatcaaaggtggggctaatcttcttataaaagaagacatgataattgacagaataaatgaaaactctattacagaaaaaactgatctgaccatgtccactgcagcttgtccaccttcctatgaccgggtgacaaagccaattgtggaaaaacatgagcaagaaggcaaagatgaaaaagccaaagggaaataa

SEQ ID NO: 810 - DNA, 9973 bp, Homo sapiens
  source 1..9973: mol_type = genomic DNA
gcccccggtgctgaaccaagatggccggtggcggccgggccccggcgtgagccaagcgcgggctgcagccgggagatgccccagcccagcggccgctgagcccgacccgacagagccggcccggccgcctccggcccacctgcgagctcggagacatgtctctgctttgcgttggagtcaaaaaagccaagtttgatggtgcccaagagaaattcaacacgtacgtgaccctgaaagtgcagaatgtcaagagcacgaccatcgcggtgcggggcagccagcccagctgggagcaggatttcatgttcgagattaaccgtctggatttgggactgacggtggaggtgtggaataagggtctcatctgggacacaatggtgggcactgtgtggatcccactgaggaccatccgccagtccaatgaggagggccctggagagtggctgacgctggactcccaggtcatcatggcagacagtgagatctgtggcaccaaggaccccaccttccaccgcatcctcctggacacgcgctttgagctacccttagacattcctgaagaggaggctcgctactgggccaagaagctggagcagctcaatgctatgcgggaccaggatgaatattcgttccaagatgagcaagacaagcctctgcctgtccccagcaaccagtgctgcaactggaattattttggctggggtgagcagcacaacgatgaccccgacagtgcagtggatgatcgtgacagtgactaccgcagtgaaacgagcaacagcatcccgccgccctattatactacgtcacaacccaacgcctcagtccaccaatattctgttcgcccaccacccctgggctcccgggagtcctacagtgactccatgcacagttacgaggagttctctgagccacaagccctcagccccacgggtagcagccgctatgcctcttccggggagctgagccagggaagctctcagctgagcgaggacttcgaccctgacgagcacagcctgcagggctccgacatggaggatgagcgggaccgggactcctaccactcctgccacagctcggtcagctaccacaaagactcgcctcgctgggaccaggatgaggaagagctggaggaggacctggaggacttcctggaggaggaggagctgcctgaagatgaggaggagctggaggaggaggaggaggaggtgcctgacgatttgggcagctatgcccagcgtgaagacgtagctgtggctgagcccaaagacttcaaacgcatcagcctcccgccagctgccccagggaaggaggacaaggccccagtggcacccaccgaggcccccgacatggccaaggtggcccccaagccagccacgcccgacaaggtgcctgcagctgagcagatccctgaggctgagccacccaaggacgaggagagtttcaggccgagagaggatgaggaaggccaggaggggcaggactccatgtccagggccaaggccaactggctgcgtgccttcaacaaggtgcggatgcagctgcaggaggcccggggagaaggagagatgtctaaatccctatggttcaaaggcggcccagggggcggtctcatcatcatcgacagcatgccagacatccgcaagaggaaacctatcccactcgtgagcgacttgtccctggtccagtccaggaaagcgggcatcacctcggccttggcctccagcacgttgaacaacgaggagctgaaaaaccacgtttacaagaagaccctgcaagccttaatctaccccatctcgtgcacgacgccacacaacttcgaagtgtggacggccaccacgcccacctactgctacgagtgcgaggggctgctgtggggcatcgcgaggcagggcatgcgctgcaccgagtgcggtgtcaagtgccacgagaagtgccaggacctgctcaacgccgactgcctgcagcgggctgcggagaagagctccaagcacggggcggaggaccggacacagaacatcatcatggtgctcaaggaccgcatgaagatccgggagcgcaacaagcccgagatcttcgagctcatccaggagatcttcgcggtgaccaagacggcgcacacgcagcagatgaaggcggtcaagcagagcgtgctggacggcacgtccaagtggtccgccaagatcagcatcaccgtggtctgcgcccagggcttgcaggcaaaggacaagacaggatccagtgacccctatgtcaccgtccaggtcgggaagaccaagaaacggacaaaaaccatctatgggaacctcaacccggtgtgggaggagaatttccactttgaatgtcacaattcctccgaccgcatcaaggtgcgcgtctgggacgaggatgacgacatcaaatcccgcgtgaaacagaggttcaagagggaatctgacgatttcctggggcagacgatcattgaggtgcggacgctcagcggcgagatggacgtgtggtacaacctggacaagcgaactgacaaatctgccgtgtcgggtgccatccggctccacatcagtgtggagatcaaaggcgaggagaaggtggccccgtaccatgtccagtacacctgtctgcatgagaacctgttccacttcgtgaccgacgtgcagaacaatggggtcgtgaagatcccagatgccaagggtgacgatgcctggaaggtttactacgatgagacagcccaggagattgtggacgagtttgccatgcgctacggcgtcgagtccatctaccaagccatgacccactttgcctgcctctcctccaagtatatgtgcccaggggtgcctgccgtcatgagcaccctgctcgccaacatcaatgcctactacgcacacaccaccgcctccaccaacgtgtctgcctccgaccgcttcgccgcctccaactttgggaaagagcgcttcgtgaaactcctggaccagctgcataactccctgcggattgacctctccatgtaccggaataacttcccagccagcagcccggagagactccaggacctcaaatccactgtggaccttctcaccagcatcaccttctttcggatgaaggtacaagaactccagagcccgccccgagccagccaggtggtaaaggactgtgtgaaagcctgccttaattctacctacgagtacatcttcaataactgccatgaactgtacagccgggagtaccagacagacccggccaagaagggggaagttctcccagaggaacaggggcccagcatcaagaacctcgacttctggtccaagctgattaccctcatagtgtccatcattgaggaagacaagaattcctacactccctgcctcaaccagtttccccaggagctgaatgtgggtaaaatcagcgctgaagtgatgtggaatctgtttgcccaagacatgaagtacgccatggaggagcacgacaagcatcgtctatgcaagagtgccgactacatgaacctccacttcaaggtgaaatggctctacaatgagtatgtgacggaacttcccgccttcaaggaccgcgtgcctgagtaccctgcatggtttgaacccttcgtcatccagtggctggatgagaatgaggaggtgtcccgggatttcctgcacggtgccctggagcgagacaagaaggatgggttccagcagacctcagagcatgccctattctcctgctccgtggtggatgttttctcccaactcaaccagagctttgaaatcatcaagaaactcgagtgtcccgaccctcagatcgtggggcactacatgaggcgctttgccaagaccatcagtaatgtgctcctccagtatgcagacatcatctccaaggactttgcctcctactgctccaaggagaaggagaaagtgccctgcattctcatgaataacactcaacagctacgagttcagctggagaagatgttcgaagccatgggaggaaaggagctggatgctgaagccagtgacatcctgaaggagcttcaggtgaaactcaataacgtcttggatgagctcagccgggtgtttgctaccagcttccagccgcacattgaagagtgtgtcaaacagatgggtgacatccttagccaggttaagggcacaggcaatgtgccagccagtgcctgcagcagcgtggcccaggacgcggacaatgtgttgcagcccatcatggacctgctggacagcaacctgaccctctttgccaaaatctgtgagaagactgtgctgaagcgagtgctgaaggagctgtggaagctggttatgaacaccatggagaaaaccatcgtcctgccgcccctcactgaccagacggggaacctcttgagaaaacatggcaagggattagaaaagggcagggtgaaattgccaagccactcagacggaacccagatgatcttcaatgcagccaaggagctgggtcagctgtccaaactcaaggatcacatggtacgagaagaagccaagagcttgaccccaaagcagtgcgcggttgttgagttggccctggacaccatcaagcaatatttccacgcgggtggcgtgggcctcaagaagaccttcctggagaagagcccggacctgcaatccttgcgctatgccctgtcgctctacacgcaggccaccgacctgctaatcaagacctttgtacagacgcaatcggcccagggcttgggtgtagaagaccctgtgggtgaagtctctgtccatgttgagctgttcactcatccaggaactggggaacacaaggtcacagtgaaagtggtggctgccaatgacctcaagtggcagacttctggcatcttccggccgttcatcgaggtcaacatcattgggccccagctcagcgacaagaaacgcaagtttgcgaccaaatccaagaacaatagctgggctcccaagtacaatgagagcttccagttcacgctgagcgccgacgcgggtcccgagtgctatgagctgcaggtgtgcgtcaaggactactgcttcgcgcgcgaggaccgcacggtggggctggccgtgctgcagctgcgtgagctggcccagcgcgggagcgccgcctgctggctgccgctcggccgccgcatccacatggacgacacgggcctcacggtgctgcgaatcctctcgcagcgcagcaacgacgaggtggccaaggagttcgtgaagctcaagtcggacacgcgctccgccgaggagggcggtgccgcgcctgcgccttagcgcgggcggtcggccgagcggcactgcgcctgcgcggagggcgctgggcggggagggacggggcttgcgccttggtgggacctccccaggggcggggctcggggggctccacgccaagggtgggctgcgcctacgcccttgactcagctttcccttttggggaattaggaatggaggatgccccgccctctcgggaggccacgcccaagggcgcgacgaaggaaggagccacatccccaacttgaggccacgcccccagcacctagggggcattttgagctgggatgggggaaacctcgtccctatggaggaggccacatcccggggctctggtaccgggaggcaccacctcatgtcccctggaaaagccataagatgggacccagacccctgggaccccagaccaattgccaagtatggaaatctcagctccctcgagggggggccctgggcaaggggtagggctctctggagcgcccctctaggtggcctggggactggagggaccaggatgctggttggagggccccggaataccggagtccctttagatatttgtgcaaaaaataaatggggggaggggggaggatgggatttcaaaagcacatgcgcccttgggcgcccaaaccctgggggccgaggggacggctctggttccccacgctgcccctacttccctttgggagtttgcctctccctctcccccaacaaacccagtcctcatatcatagagttcaacacacccatttgacagatggcaaaactgaggcttaaagagctgcttgagacttggccaaggttccaggtgccataccctctgtgcccctcccttaggcctgtgtgccccatggaagggtgggctgagatcgggatgacctgacacagctccctattgctgctaattccccctcggcctcctccaaggggtgggaattccaggccaagacccctacttcgcctttccttctccggctgccaagcaggacctttgccctcagccctttctcctgggatctccatgggggatgccatgagggcctcccaccacaaaagagaatttgggatcccctggtcccaggtttctccatcccttcttccttttccagaattttccaaataggaaagaacagaaggagaccagaaactctaggggggagaaagagaatgagagaaagagaatgagagagagagaaacacaaacacagtgacacagtgagagcttagtctccaagagcctattcattgattcaaacacccaagccacaggatacctcagatggccctcttgccagctggaagctctttctccaatgagcaaagttacagtgacctggctggagttacctggtgcacataggaccttaggggaaagttcagcgtggactacacttgctctgggatctgcttttccacatgtgtgtatggcacgcctttttctgctggattgggaaggacaagattttgctgtgctagggagaaatgaaaacggggtgagctgagtagctgggtttctggaggatagaacatcagatggggaggctttccgaggtgaagaatgagagggaaccacttactagagagaaaagagctccaggcctggggaacagcacgtgcgaaggccaggagagaagaactgttgaaacaacgagaagggtggcacggctggagctgagccagcaagggggatcgtgaggagccttggggttggggagatctgcagaagcatcagaccaggcagggcctcgtacgcagtcctgaggagttttacttttattctaagacagttggggagctccaggagctgttttaagttggggagagactggattccagcctgcaaaagctgttttgtgaagactaaaaccagtgaggagaggtggaggtgctttggggacactgaaatggattcttggaaagattctgaaggctgtgttgaaaagacacctatagctgtggggacatgactataatcccagcatttggggagaccgaggctggcagatcacttaaggtcaggagtttgagaccagcctggccaacatggcgaaaccccatctctgctaaaaatacaaaaattagctgggtgcagtggtgcatgcctgtagtcccagctactcaggagactgaggcgggagaattgtttgaaccctggaggcagaggttgtagtgagtcgtgatcacacaactgcactccagcctgggcaacagaacaatactccattccctcccctctaccccaccaaaaaaaaaaaaaaatcctgcccttagatgagctctagggctgctgagtacagttgtcccagttgcacagtgcccaagggtttggcattgctaagaaggccacgtgcaaatcctagatattgagtgttgtatgtttgtgacgttggtttcccgacatgtgaatggcccaagtgtctggaagaagtggcgccactttctaatttgcttggagatgttgcatgtcccttaaattcagacaggtgcaggtaactggaggttctgaaccaaaggttaaaatgcaaattctcatacagggttgggaagttgtagccagggataagcttatgtgactgttatatggactgaggagcagatgtgaatttcgaaccatgacatggctgagggtaggggtcgggtggatggatgattcagggttgtaacccatagagcccaaaggggaagtgatctgtgacctggggtgagggtgatctggaagatttttggatggctggaaagaaatggggaagtcgagctgcctgagagagccaagttatttcccaaaagattccttaggagtctttctgttcaagacctccgtgtgtgtgtgtgtgtgtttagggttccccagcaatggcccaggcatgtgaaggaaacaagcttcttcagggaatatttgttgaatgagttttcctgactcccaggctagaactgtttttgcaatttccaccctcttttctttcccccagagaactcctattcgtccttcaaaacccatcacggaaacccctcttggagaaaaccctccttccttcccctcaggactttcccagccaccgtctctcctccagtccagcctgatgccatgggactgggggtttctctgtccagctctgtttctcccagactggggtctgaggactctcaggacccccaactttacctagcacaggctgggcacaagtgggtgacagggagtctacgcctagtggaattatgtattggggcagggtcagtgtgagaatacacatccgcatgcatgtctgtccatgtctgtccgtaccaaccttccccttccacacggacctgggcacataggaggtgtctgagcctgacacatgggacagagagtggacatggctgagacacggacagagaaaagacaaggagtccagggggctgaaagccttttgaaatcaggaagttcctgtattggcagaacaaagcccagagaggagcagggctttcctcaacgccacccagcaagtggacacagagcccggccttggatgacacctccagggttctgaaccctggacctcgctttatgcaaggagctggccccacatttccatgaatcggggaaacagcacaagaaggttggcctgtggcagggcaagggttaaaggggtgacattgagggatgcctcagagtcaaagtcccctgaccaagaggaatagagtagaaaacacagagacagagggtgagatcacgccccgatgaggacggagagagacagagatggagagagacatagaggtggaaatatacagagaaagataaatgcagagaccaaggcagggagtgtcgggggaagtaaagagggtgtcctgaagaaagaaggatctgttcactcttaccagtctgtcctcgaatgatttgcataaaatgaggaggtgcctgtccacacccccaattcctctctcaggccccagagcctgagacctcaccatgcccccatcagagatgcaaaaaactaaacacccaactagaaatccttgggacctctctcggctgggatctcagagcctttctgtcccctacccctaccccatgtgctgtcgattttgcagatggggacaacctggggcctcccggaactctgccaccctggggaagttgggggagggccttagtcccggatcacaaccccgtctgctccccagaatcctttcctaagaatcgttgaggaccaaagttgtctttgctgacacgtgttgcttttctctttgccttttattgtttcagagaaaaatcaagttgactgtgtcaagtaacaccccaccccttacccccgtccagccatagtggctctctggagacacaggtcacaggcggagggtcccctgatcatccccaaccacacagccagggggacttgacccctgtccacccctgtctcgtgctccctcagacccccacaaaccggccaagcagtccggggaggcttcccctccacacaactcttagcatgtgattgcagatgtgaaatcaaaacgttgtttgttttttgttttgttttgattctaccccgtcggtccagtgtctgcacagacgccttcatttctctgtaaatatgtgacttggaacaaatgtttaacacaaacgagaagtggtcatgaatgcatggtgttgagatgttttgcactattctgactttttggtctctgtaaaaatattttattaacagcagacattaaaaaaagaaaaaccacacaca

SEQ ID NO: 811 - DNA, 9970 bp, Homo sapiens
  source 1..9970: mol_type = genomic DNA
gcccccggtgctgaaccaagatggccggtggcggccgggccccggcgtgagccaagcgcgggctgcagccgggagatgccccagcccagcggccgctgagcccgacccgacagagccggcccggccgcctccggcccacctgcgagctcggagacatgtctctgctttgcgttggagtcaaaaaagccaagtttgatggtgcccaagagaaattcaacacgtacgtgaccctgaaagtgcagaatgtcaagagcacgaccatcgcggtgcggggcagccagcccagctgggagcaggatttcatgttcgagattaaccgtctggatttgggactgacggtggaggtgtggaataagggtctcatctgggacacaatggtgggcactgtgtggatcccactgaggaccatccgccagtccaatgaggagggccctggagagtggctgacgctggactcccaggtcatcatggcagacagtgagatctgtggcaccaaggaccccaccttccaccgcatcctcctggacacgcgctttgagctacccttagacattcctgaagaggaggctcgctactgggccaagaagctggagcagctcaatgctatgcgggaccaggatgaatattcgttccaagatgagcaagacaagcctctgcctgtccccagcaaccagtgctgcaactggaattattttggctggggtgagcagcacaacgatgaccccgacagtgcagtggatgatcgtgacagtgactaccgcagtgaaacgagcaacagcatcccgccgccctattatactacgtcacaacccaacgcctcagtccaccaatattctgttcgcccaccacccctgggctcccgggagtcctacagtgactccatgcacagttacgaggagttctctgagccacaagccctcagccccacgggtagcagccgctatgcctcttccggggagctgagccagggaagctctcagctgagcgaggacttcgaccctgacgagcacagcctgcagggctccgacatggaggatgagcgggaccgggactcctaccactcctgccacagctcggtcagctaccacaaagactcgcctcgctgggaccaggatgaggaagagctggaggaggacctggaggacttcctggaggaggaggagctgcctgaagatgaggaggagctggaggaggaggaggaggaggtgcctgacgatttgggcagctatgcccagcgtgaagacgtagctgtggctgagcccaaagacttcaaacgcatcagcctcccgccagctgccccagggaaggaggacaaggccccagtggcacccaccgaggcccccgacatggccaaggtggcccccaagccagccacgcccgacaaggtgcctgcagctgagcagatccctgaggctgagccacccaaggacgaggagagtttcaggccgagagaggatgaggaaggccaggaggggcaggactccatgtccagggccaaggccaactggctgcgtgccttcaacaaggtgcggatgcagctgcaggaggcccggggagaaggagagatgtctaaatccctatggttcaaaggcggcccagggggcggtctcatcatcatcgacagcatgccagacatccgcaagaggaaacctatcccactcgtgagcgacttgtccctggtccagtccaggaaagcgggcatcacctcggccttggcctccagcacgttgaacaacgaggagctgaaaaaccacgtttacaagaagaccctgcaagccttaatctaccccatctcgtgcacgacgccacacaacttcgaagtgtggacggccaccacgcccacctactgctacgagtgcgaggggctgctgtggggcatcgcgaggcagggcatgcgctgcaccgagtgcggtgtcaagtgccacgagaagtgccaggacctgctcaacgccgactgcctgcagcgggctgcggagaagagctccaagcacggggcggaggaccggacacagaacatcatcatggtgctcaaggaccgcatgaagatccgggagcgcaacaagcccgagatcttcgagctcatccaggagatcttcgcggtgaccaagacggcgcacacgcagcagatgaaggcggtcaagcagagcgtgctggacggcacgtccaagtggtccgccaagatcagcatcaccgtggtctgcgcccagggcttgcaggcaaaggacaagacaggatccagtgacccctatgtcaccgtccaggtcgggaagaccaagaaacggacaaaaaccatctatgggaacctcaacccggtgtgggaggagaatttccactttgaatgtcacaattcctccgaccgcatcaaggtgcgcgtctgggacgaggatgacgacatcaaatcccgcgtgaaacagaggttcaagagggaatctgacgatttcctggggcagacgatcattgaggtgcggacgctcagcggcgagatggacgtgtggtacaacctggacaagcgaactgacaaatctgccgtgtcgggtgccatccggctccacatcagtgtggagatcaaaggcgaggagaaggtggccccgtaccatgtccagtacacctgtctgcatgagaacctgttccacttcgtgaccgacgtgcagaacaatggggtcgtgaagatcccagatgccaagggtgacgatgcctggaaggtttactacgatgagacagcccaggagattgtggacgagtttgccatgcgctacggcgtcgagtccatctaccaagccatgacccactttgcctgcctctcctccaagtatatgtgcccaggggtgcctgccgtcatgagcaccctgctcgccaacatcaatgcctactacgcacacaccaccgcctccaccaacgtgtctgcctccgaccgcttcgccgcctccaactttgggaaagagcgcttcgtgaaactcctggaccagctgcataactccctgcggattgacctctccatgtaccggaataacttcccagccagcagcccggagagactccaggacctcaaatccactgtggaccttctcaccagcatcaccttctttcggatgaaggtacaagaactccagagcccgccccgagccagccaggtggtaaaggactgtgtgaaagcctgccttaattctacctacgagtacatcttcaataactgccatgaactgtacagccgggagtaccagacagacccggccaagaagggggaagttctcccagaggaacaggggcccagcatcaagaacctcgacttctggtccaagctgattaccctcatagtgtccatcattgaggaagacaagaattcctacactccctgcctcaaccagtttccccaggagctgaatgtgggtaaaatcagcgctgaagtgatgtggaatctgtttgcccaagacatgaagtacgccatggaggagcacgacaagcatcgtctatgcaagagtgccgactacatgaacctccacttcaaggtgaaatggctctacaatgagtatgtgacggaacttcccgccttcaaggaccgcgtgcctgagtaccctgcatggtttgaacccttcgtcatccagtggctggatgagaatgaggaggtgtcccgggatttcctgcacggtgccctggagcgagacaagaaggatgggttccagcagacctcagagcatgccctattctcctgctccgtggtggatgttttctcccaactcaaccagagctttgaaatcatcaagaaactcgagtgtcccgaccctcagatcgtggggcactacatgaggcgctttgccaagaccatcagtaatgtgctcctccagtatgcagacatcatctccaaggactttgcctcctactgctccaaggagaaggagaaaccctgcattctcatgaataacactcaacagctacgagttcagctggagaagatgttcgaagccatgggaggaaaggagctggatgctgaagccagtgacatcctgaaggagcttcaggtgaaactcaataacgtcttggatgagctcagccgggtgtttgctaccagcttccagccgcacattgaagagtgtgtcaaacagatgggtgacatccttagccaggttaagggcacaggcaatgtgccagccagtgcctgcagcagcgtggcccaggacgcggacaatgtgttgcagcccatcatggacctgctggacagcaacctgaccctctttgccaaaatctgtgagaagactgtgctgaagcgagtgctgaaggagctgtggaagctggttatgaacaccatggagaaaaccatcgtcctgccgcccctcactgaccagacggggaacctcttgagaaaacatggcaagggattagaaaagggcagggtgaaattgccaagccactcagacggaacccagatgatcttcaatgcagccaaggagctgggtcagctgtccaaactcaaggatcacatggtacgagaagaagccaagagcttgaccccaaagcagtgcgcggttgttgagttggccctggacaccatcaagcaatatttccacgcgggtggcgtgggcctcaagaagaccttcctggagaagagcccggacctgcaatccttgcgctatgccctgtcgctctacacgcaggccaccgacctgctaatcaagacctttgtacagacgcaatcggcccagggcttgggtgtagaagaccctgtgggtgaagtctctgtccatgttgagctgttcactcatccaggaactggggaacacaaggtcacagtgaaagtggtggctgccaatgacctcaagtggcagacttctggcatcttccggccgttcatcgaggtcaacatcattgggccccagctcagcgacaagaaacgcaagtttgcgaccaaatccaagaacaatagctgggctcccaagtacaatgagagcttccagttcacgctgagcgccgacgcgggtcccgagtgctatgagctgcaggtgtgcgtcaaggactactgcttcgcgcgcgaggaccgcacggtggggctggccgtgctgcagctgcgtgagctggcccagcgcgggagcgccgcctgctggctgccgctcggccgccgcatccacatggacgacacgggcctcacggtgctgcgaatcctctcgcagcgcagcaacgacgaggtggccaaggagttcgtgaagctcaagtcggacacgcgctccgccgaggagggcggtgccgcgcctgcgccttagcgcgggcggtcggccgagcggcactgcgcctgcgcggagggcgctgggcggggagggacggggcttgcgccttggtgggacctccccaggggcggggctcggggggctccacgccaagggtgggctgcgcctacgcccttgactcagctttcccttttggggaattaggaatggaggatgccccgccctctcgggaggccacgcccaagggcgcgacgaaggaaggagccacatccccaacttgaggccacgcccccagcacctagggggcattttgagctgggatgggggaaacctcgtccctatggaggaggccacatcccggggctctggtaccgggaggcaccacctcatgtcccctggaaaagccataagatgggacccagacccctgggaccccagaccaattgccaagtatggaaatctcagctccctcgagggggggccctgggcaaggggtagggctctctggagcgcccctctaggtggcctggggactggagggaccaggatgctggttggagggccccggaataccggagtccctttagatatttgtgcaaaaaataaatggggggaggggggaggatgggatttcaaaagcacatgcgcccttgggcgcccaaaccctgggggccgaggggacggctctggttccccacgctgcccctacttccctttgggagtttgcctctccctctcccccaacaaacccagtcctcatatcatagagttcaacacacccatttgacagatggcaaaactgaggcttaaagagctgcttgagacttggccaaggttccaggtgccataccctctgtgcccctcccttaggcctgtgtgccccatggaagggtgggctgagatcgggatgacctgacacagctccctattgctgctaattccccctcggcctcctccaaggggtgggaattccaggccaagacccctacttcgcctttccttctccggctgccaagcaggacctttgccctcagccctttctcctgggatctccatgggggatgccatgagggcctcccaccacaaaagagaatttgggatcccctggtcccaggtttctccatcccttcttccttttccagaattttccaaataggaaagaacagaaggagaccagaaactctaggggggagaaagagaatgagagaaagagaatgagagagagagaaacacaaacacagtgacacagtgagagcttagtctccaagagcctattcattgattcaaacacccaagccacaggatacctcagatggccctcttgccagctggaagctctttctccaatgagcaaagttacagtgacctggctggagttacctggtgcacataggaccttaggggaaagttcagcgtggactacacttgctctgggatctgcttttccacatgtgtgtatggcacgcctttttctgctggattgggaaggacaagattttgctgtgctagggagaaatgaaaacggggtgagctgagtagctgggtttctggaggatagaacatcagatggggaggctttccgaggtgaagaatgagagggaaccacttactagagagaaaagagctccaggcctggggaacagcacgtgcgaaggccaggagagaagaactgttgaaacaacgagaagggtggcacggctggagctgagccagcaagggggatcgtgaggagccttggggttggggagatctgcagaagcatcagaccaggcagggcctcgtacgcagtcctgaggagttttacttttattctaagacagttggggagctccaggagctgttttaagttggggagagactggattccagcctgcaaaagctgttttgtgaagactaaaaccagtgaggagaggtggaggtgctttggggacactgaaatggattcttggaaagattctgaaggctgtgttgaaaagacacctatagctgtggggacatgactataatcccagcatttggggagaccgaggctggcagatcacttaaggtcaggagtttgagaccagcctggccaacatggcgaaaccccatctctgctaaaaatacaaaaattagctgggtgcagtggtgcatgcctgtagtcccagctactcaggagactgaggcgggagaattgtttgaaccctggaggcagaggttgtagtgagtcgtgatcacacaactgcactccagcctgggcaacagaacaatactccattccctcccctctaccccaccaaaaaaaaaaaaaaatcctgcccttagatgagctctagggctgctgagtacagttgtcccagttgcacagtgcccaagggtttggcattgctaagaaggccacgtgcaaatcctagatattgagtgttgtatgtttgtgacgttggtttcccgacatgtgaatggcccaagtgtctggaagaagtggcgccactttctaatttgcttggagatgttgcatgtcccttaaattcagacaggtgcaggtaactggaggttctgaaccaaaggttaaaatgcaaattctcatacagggttgggaagttgtagccagggataagcttatgtgactgttatatggactgaggagcagatgtgaatttcgaaccatgacatggctgagggtaggggtcgggtggatggatgattcagggttgtaacccatagagcccaaaggggaagtgatctgtgacctggggtgagggtgatctggaagatttttggatggctggaaagaaatggggaagtcgagctgcctgagagagccaagttatttcccaaaagattccttaggagtctttctgttcaagacctccgtgtgtgtgtgtgtgtgtttagggttccccagcaatggcccaggcatgtgaaggaaacaagcttcttcagggaatatttgttgaatgagttttcctgactcccaggctagaactgtttttgcaatttccaccctcttttctttcccccagagaactcctattcgtccttcaaaacccatcacggaaacccctcttggagaaaaccctccttccttcccctcaggactttcccagccaccgtctctcctccagtccagcctgatgccatgggactgggggtttctctgtccagctctgtttctcccagactggggtctgaggactctcaggacccccaactttacctagcacaggctgggcacaagtgggtgacagggagtctacgcctagtggaattatgtattggggcagggtcagtgtgagaatacacatccgcatgcatgtctgtccatgtctgtccgtaccaaccttccccttccacacggacctgggcacataggaggtgtctgagcctgacacatgggacagagagtggacatggctgagacacggacagagaaaagacaaggagtccagggggctgaaagccttttgaaatcaggaagttcctgtattggcagaacaaagcccagagaggagcagggctttcctcaacgccacccagcaagtggacacagagcccggccttggatgacacctccagggttctgaaccctggacctcgctttatgcaaggagctggccccacatttccatgaatcggggaaacagcacaagaaggttggcctgtggcagggcaagggttaaaggggtgacattgagggatgcctcagagtcaaagtcccctgaccaagaggaatagagtagaaaacacagagacagagggtgagatcacgccccgatgaggacggagagagacagagatggagagagacatagaggtggaaatatacagagaaagataaatgcagagaccaaggcagggagtgtcgggggaagtaaagagggtgtcctgaagaaagaaggatctgttcactcttaccagtctgtcctcgaatgatttgcataaaatgaggaggtgcctgtccacacccccaattcctctctcaggccccagagcctgagacctcaccatgcccccatcagagatgcaaaaaactaaacacccaactagaaatccttgggacctctctcggctgggatctcagagcctttctgtcccctacccctaccccatgtgctgtcgattttgcagatggggacaacctggggcctcccggaactctgccaccctggggaagttgggggagggccttagtcccggatcacaaccccgtctgctccccagaatcctttcctaagaatcgttgaggaccaaagttgtctttgctgacacgtgttgcttttctctttgccttttattgtttcagagaaaaatcaagttgactgtgtcaagtaacaccccaccccttacccccgtccagccatagtggctctctggagacacaggtcacaggcggagggtcccctgatcatccccaaccacacagccagggggacttgacccctgtccacccctgtctcgtgctccctcagacccccacaaaccggccaagcagtccggggaggcttcccctccacacaactcttagcatgtgattgcagatgtgaaatcaaaacgttgtttgttttttgttttgttttgattctaccccgtcggtccagtgtctgcacagacgccttcatttctctgtaaatatgtgacttggaacaaatgtttaacacaaacgagaagtggtcatgaatgcatggtgttgagatgttttgcactattctgactttttggtctctgtaaaaatattttattaacagcagacattaaaaaaagaaaaaccacacaca

SEQ ID NO: 812 - DNA, 9904 bp, Homo sapiens
  source 1..9904: mol_type = genomic DNA
gcccccggtgctgaaccaagatggccggtggcggccgggccccggcgtgagccaagcgcgggctgcagccgggagatgccccagcccagcggccgctgagcccgacccgacagagccggcccggccgcctccggcccacctgcgagctcggagacatgtctctgctttgcgttggagtcaaaaaagccaagtttgatggtgcccaagagaaattcaacacgtacgtgaccctgaaagtgcagaatgtcaagagcacgaccatcgcggtgcggggcagccagcccagctgggagcaggatttcatgttcgagattaaccgtctggatttgggactgacggtggaggtgtggaataagggtctcatctgggacacaatggtgggcactgtgtggatcccactgaggaccatccgccagtccaatgaggagggccctggagagtggctgacgctggactcccaggtcatcatggcagacagtgagatctgtggcaccaaggaccccaccttccaccgcatcctcctggacacgcgctttgagctacccttagacattcctgaagaggaggctcgctactgggccaagaagctggagcagctcaatgctatgcgggaccaggatgaatattcgttccaagatgagcaagacaagcctctgcctgtccccagcaaccagtgctgcaactggaattattttggctggggtgagcagcacaacgatgaccccgacagtgcagtggatgatcgtgacagtgactaccgcagtgaaacgagcaacagcatcccgccgccctattatactacgtcacaacccaacgcctcagtccaccaatattctgttcgcccaccacccctgggctcccgggagtcctacagtgactccatgcacagttacgaggagttctctgagccacaagccctcagccccacgggtagcagccgctatgcctcttccggggagctgagccagggaagctctcagctgagcgaggacttcgaccctgacgagcacagcctgcagggctccgacatggaggatgagcgggaccgggactcctaccactcctgccacagctcggtcagctaccacaaagactcgcctcgctgggaccaggatgaggaagagctggaggaggacctggaggacttcctggaggaggaggagctgcctgaagatgaggaggagctggaggaggaggaggaggaggtgcctgacgatttgggcagctatgcccagcgtgaagacgtagctgtggctgagcccaaagacttcaaacgcatcagcctcccgccagctgccccagggaaggaggacaaggccccagtggcacccaccgaggcccccgacatggccaaggtggcccccaagccagccacgcccgacaaggtgcctgcagctgagcagatccctgaggctgagccacccaaggacgaggagagtttcaggccgagagaggatgaggaaggccaggaggggcaggactccatgtccagggccaaggccaactggctgcgtgccttcaacaaggtgcggatgcagctgcaggaggcccggggagaaggagagatgtctaaatccctatggttcaaaggcggcccagggggcggtctcatcatcatcgacagcatgccagacatccgcaagaggaaacctatcccactcgtgagcgacttgtccctggtccagtccaggaaagcgggcatcacctcggccttggcctccagcacgttgaacaacgaggagctgaaaaaccacgtttacaagaagaccctgcaagccttaatctaccccatctcgtgcacgacgccacacaacttcgaagtgtggacggccaccacgcccacctactgctacgagtgcgaggggctgctgtggggcatcgcgaggcagggcatgcgctgcaccgagtgcggtgtcaagtgccacgagaagtgccaggacctgctcaacgccgactgcctgcagcgggctgcggagaagagctccaagcacggggcggaggaccggacacagaacatcatcatggtgctcaaggaccgcatgaagatccgggagcgcaacaagcccgagatcttcgagctcatccaggagatcttcgcggtgaccaagacggcgcacacgcagcagatgaaggcggtcaagcagagcgtgctggacggcacgtccaagtggtccgccaagatcagcatcaccgtggtctgcgcccagggcttgcaggcaaaggacaagacaggatccagtgacccctatgtcaccgtccaggtcgggaagaccaagaaacggacaaaaaccatctatgggaacctcaacccggtgtgggaggagaatttccactttgaatgtcacaattcctccgaccgcatcaaggtgcgcgtctgggacgaggatgacgacatcaaatcccgcgtgaaacagaggttcaagagggaatctgacgatttcctggggcagacgatcattgaggtgcggacgctcagcggcgagatggacgtgtggtacaacctggacaagcgaactgacaaatctgccgtgtcgggtgccatccggctccacatcagtgtggagatcaaaggcgaggagaaggtggccccgtaccatgtccagtacacctgtctgcatgagaacctgttccacttcgtgaccgacgtgcagaacaatggggtcgtgaagatcccagatgccaagggtgacgatgcctggaaggtttactacgatgagacagcccaggagattgtggacgagtttgccatgcgctacggcgtcgagtccatctaccaagccatgacccactttgcctgcctctcctccaagtatatgtgcccaggggtgcctgccgtcatgagcaccctgctcgccaacatcaatgcctactacgcacacaccaccgcctccaccaacgtgtctgcctccgaccgcttcgccgcctccaactttgggaaagagcgcttcgtgaaactcctggaccagctgcataactccctgcggattgacctctccatgtaccggaataacttcccagccagcagcccggagagactccaggacctcaaatccactgtggaccttctcaccagcatcaccttctttcggatgaaggtacaagaactccagagcccgccccgagccagccaggtggtaaaggactgtgtgaaagcctgccttaattctacctacgagtacatcttcaataactgccatgaactgtacagccgggagtaccagacagacccggccaagaagggggaagttctcccagaggaacaggggcccagcatcaagaacctcgacttctggtccaagctgattaccctcatagtgtccatcattgaggaagacaagaattcctacactccctgcctcaaccagtttccccaggagctgaatgtgggtaaaatcagcgctgaagtgatgtggaatctgtttgcccaagacatgaagtacgccatggaggagcacgacaagcatcgtctatgcaagagtgccgactacatgaacctccacttcaaggtgaaatggctctacaatgagtatgtgacggaacttcccgccttcaaggaccgcgtgcctgagtaccctgcatggtttgaacccttcgtcatccagtggctggatgagaatgaggaggtgtcccgggatttcctgcacggtgccctggagcgagacaagaaggatgggttccagcagacctcagagcatgccctattctcctgctccgtggtggatgttttctcccaactcaaccagagctttgaaatcatcaagaaactcgagtgtcccgaccctcagatcgtggggcactacatgaggcgctttgccaagaccatcagtaatgtgctcctccagtatgcagacatcatctccaaggactttgcctcctactgctccaaggagaaggagaaagtgccctgcattctcatgaataacactcaacagctacgagttcagctggagaagatgttcgaagccatgggaggaaaggagctggatgctgaagccagtgacatcctgaaggagcttcaggtgaaactcaataacgtcttggatgagctcagccgggtgtttgctaccagcttccagccgcacattgaagagtgtgtcaaacagatgggtgacatccttagccaggttaagggcacaggcaatgtgccagccagtgcctgcagcagcgtggcccaggacgcggacaatgtgttgcagcccatcatggacctgctggacagcaacctgaccctctttgccaaaatctgtgagaagactgtgctgaagcgagtgctgaaggagctgtggaagctggttatgaacaccatggagaaaaccatcgtcctgccgcccctcactgaccagacgggaacccagatgatcttcaatgcagccaaggagctgggtcagctgtccaaactcaaggatcacatggtacgagaagaagccaagagcttgaccccaaagcagtgcgcggttgttgagttggccctggacaccatcaagcaatatttccacgcgggtggcgtgggcctcaagaagaccttcctggagaagagcccggacctgcaatccttgcgctatgccctgtcgctctacacgcaggccaccgacctgctaatcaagacctttgtacagacgcaatcggcccagggcttgggtgtagaagaccctgtgggtgaagtctctgtccatgttgagctgttcactcatccaggaactggggaacacaaggtcacagtgaaagtggtggctgccaatgacctcaagtggcagacttctggcatcttccggccgttcatcgaggtcaacatcattgggccccagctcagcgacaagaaacgcaagtttgcgaccaaatccaagaacaatagctgggctcccaagtacaatgagagcttccagttcacgctgagcgccgacgcgggtcccgagtgctatgagctgcaggtgtgcgtcaaggactactgcttcgcgcgcgaggaccgcacggtggggctggccgtgctgcagctgcgtgagctggcccagcgcgggagcgccgcctgctggctgccgctcggccgccgcatccacatggacgacacgggcctcacggtgctgcgaatcctctcgcagcgcagcaacgacgaggtggccaaggagttcgtgaagctcaagtcggacacgcgctccgccgaggagggcggtgccgcgcctgcgccttagcgcgggcggtcggccgagcggcactgcgcctgcgcggagggcgctgggcggggagggacggggcttgcgccttggtgggacctccccaggggcggggctcggggggctccacgccaagggtgggctgcgcctacgcccttgactcagctttcccttttggggaattaggaatggaggatgccccgccctctcgggaggccacgcccaagggcgcgacgaaggaaggagccacatccccaacttgaggccacgcccccagcacctagggggcattttgagctgggatgggggaaacctcgtccctatggaggaggccacatcccggggctctggtaccgggaggcaccacctcatgtcccctggaaaagccataagatgggacccagacccctgggaccccagaccaattgccaagtatggaaatctcagctccctcgagggggggccctgggcaaggggtagggctctctggagcgcccctctaggtggcctggggactggagggaccaggatgctggttggagggccccggaataccggagtccctttagatatttgtgcaaaaaataaatggggggaggggggaggatgggatttcaaaagcacatgcgcccttgggcgcccaaaccctgggggccgaggggacggctctggttccccacgctgcccctacttccctttgggagtttgcctctccctctcccccaacaaacccagtcctcatatcatagagttcaacacacccatttgacagatggcaaaactgaggcttaaagagctgcttgagacttggccaaggttccaggtgccataccctctgtgcccctcccttaggcctgtgtgccccatggaagggtgggctgagatcgggatgacctgacacagctccctattgctgctaattccccctcggcctcctccaaggggtgggaattccaggccaagacccctacttcgcctttccttctccggctgccaagcaggacctttgccctcagccctttctcctgggatctccatgggggatgccatgagggcctcccaccacaaaagagaatttgggatcccctggtcccaggtttctccatcccttcttccttttccagaattttccaaataggaaagaacagaaggagaccagaaactctaggggggagaaagagaatgagagaaagagaatgagagagagagaaacacaaacacagtgacacagtgagagcttagtctccaagagcctattcattgattcaaacacccaagccacaggatacctcagatggccctcttgccagctggaagctctttctccaatgagcaaagttacagtgacctggctggagttacctggtgcacataggaccttaggggaaagttcagcgtggactacacttgctctgggatctgcttttccacatgtgtgtatggcacgcctttttctgctggattgggaaggacaagattttgctgtgctagggagaaatgaaaacggggtgagctgagtagctgggtttctggaggatagaacatcagatggggaggctttccgaggtgaagaatgagagggaaccacttactagagagaaaagagctccaggcctggggaacagcacgtgcgaaggccaggagagaagaactgttgaaacaacgagaagggtggcacggctggagctgagccagcaagggggatcgtgaggagccttggggttggggagatctgcagaagcatcagaccaggcagggcctcgtacgcagtcctgaggagttttacttttattctaagacagttggggagctccaggagctgttttaagttggggagagactggattccagcctgcaaaagctgttttgtgaagactaaaaccagtgaggagaggtggaggtgctttggggacactgaaatggattcttggaaagattctgaaggctgtgttgaaaagacacctatagctgtggggacatgactataatcccagcatttggggagaccgaggctggcagatcacttaaggtcaggagtttgagaccagcctggccaacatggcgaaaccccatctctgctaaaaatacaaaaattagctgggtgcagtggtgcatgcctgtagtcccagctactcaggagactgaggcgggagaattgtttgaaccctggaggcagaggttgtagtgagtcgtgatcacacaactgcactccagcctgggcaacagaacaatactccattccctcccctctaccccaccaaaaaaaaaaaaaaatcctgcccttagatgagctctagggctgctgagtacagttgtcccagttgcacagtgcccaagggtttggcattgctaagaaggccacgtgcaaatcctagatattgagtgttgtatgtttgtgacgttggtttcccgacatgtgaatggcccaagtgtctggaagaagtggcgccactttctaatttgcttggagatgttgcatgtcccttaaattcagacaggtgcaggtaactggaggttctgaaccaaaggttaaaatgcaaattctcatacagggttgggaagttgtagccagggataagcttatgtgactgttatatggactgaggagcagatgtgaatttcgaaccatgacatggctgagggtaggggtcgggtggatggatgattcagggttgtaacccatagagcccaaaggggaagtgatctgtgacctggggtgagggtgatctggaagatttttggatggctggaaagaaatggggaagtcgagctgcctgagagagccaagttatttcccaaaagattccttaggagtctttctgttcaagacctccgtgtgtgtgtgtgtgtgtttagggttccccagcaatggcccaggcatgtgaaggaaacaagcttcttcagggaatatttgttgaatgagttttcctgactcccaggctagaactgtttttgcaatttccaccctcttttctttcccccagagaactcctattcgtccttcaaaacccatcacggaaacccctcttggagaaaaccctccttccttcccctcaggactttcccagccaccgtctctcctccagtccagcctgatgccatgggactgggggtttctctgtccagctctgtttctcccagactggggtctgaggactctcaggacccccaactttacctagcacaggctgggcacaagtgggtgacagggagtctacgcctagtggaattatgtattggggcagggtcagtgtgagaatacacatccgcatgcatgtctgtccatgtctgtccgtaccaaccttccccttccacacggacctgggcacataggaggtgtctgagcctgacacatgggacagagagtggacatggctgagacacggacagagaaaagacaaggagtccagggggctgaaagccttttgaaatcaggaagttcctgtattggcagaacaaagcccagagaggagcagggctttcctcaacgccacccagcaagtggacacagagcccggccttggatgacacctccagggttctgaaccctggacctcgctttatgcaaggagctggccccacatttccatgaatcggggaaacagcacaagaaggttggcctgtggcagggcaagggttaaaggggtgacattgagggatgcctcagagtcaaagtcccctgaccaagaggaatagagtagaaaacacagagacagagggtgagatcacgccccgatgaggacggagagagacagagatggagagagacatagaggtggaaatatacagagaaagataaatgcagagaccaaggcagggagtgtcgggggaagtaaagagggtgtcctgaagaaagaaggatctgttcactcttaccagtctgtcctcgaatgatttgcataaaatgaggaggtgcctgtccacacccccaattcctctctcaggccccagagcctgagacctcaccatgcccccatcagagatgcaaaaaactaaacacccaactagaaatccttgggacctctctcggctgggatctcagagcctttctgtcccctacccctaccccatgtgctgtcgattttgcagatggggacaacctggggcctcccggaactctgccaccctggggaagttgggggagggccttagtcccggatcacaaccccgtctgctccccagaatcctttcctaagaatcgttgaggaccaaagttgtctttgctgacacgtgttgcttttctctttgccttttattgtttcagagaaaaatcaagttgactgtgtcaagtaacaccccaccccttacccccgtccagccatagtggctctctggagacacaggtcacaggcggagggtcccctgatcatccccaaccacacagccagggggacttgacccctgtccacccctgtctcgtgctccctcagacccccacaaaccggccaagcagtccggggaggcttcccctccacacaactcttagcatgtgattgcagatgtgaaatcaaaacgttgtttgttttttgttttgttttgattctaccccgtcggtccagtgtctgcacagacgccttcatttctctgtaaatatgtgacttggaacaaatgtttaacacaaacgagaagtggtcatgaatgcatggtgttgagatgttttgcactattctgactttttggtctctgtaaaaatattttattaacagcagacattaaaaaaagaaaaaccacacaca

SEQ ID NO: 813 - DNA, 9955 bp, Homo sapiens
  source 1..9955: mol_type = genomic DNA
gcccccggtgctgaaccaagatggccggtggcggccgggccccggcgtgagccaagcgcgggctgcagccgggagatgccccagcccagcggccgctgagcccgacccgacagagccggcccggccgcctccggcccacctgcgagctcggagacatgtctctgctttgcgttggagagaaattcaacacgtacgtgaccctgaaagtgcagaatgtcaagagcacgaccatcgcggtgcggggcagccagcccagctgggagcaggatttcatgttcgagattaaccgtctggatttgggactgacggtggaggtgtggaataagggtctcatctgggacacaatggtgggcactgtgtggatcccactgaggaccatccgccagtccaatgaggagggccctggagagtggctgacgctggactcccaggtcatcatggcagacagtgagatctgtggcaccaaggaccccaccttccaccgcatcctcctggacacgcgctttgagctacccttagacattcctgaagaggaggctcgctactgggccaagaagctggagcagctcaatgctatgcgggaccaggatgaatattcgttccaagatgagcaagacaagcctctgcctgtccccagcaaccagtgctgcaactggaattattttggctggggtgagcagcacaacgatgaccccgacagtgcagtggatgatcgtgacagtgactaccgcagtgaaacgagcaacagcatcccgccgccctattatactacgtcacaacccaacgcctcagtccaccaatattctgttcgcccaccacccctgggctcccgggagtcctacagtgactccatgcacagttacgaggagttctctgagccacaagccctcagccccacgggtagcagccgctatgcctcttccggggagctgagccagggaagctctcagctgagcgaggacttcgaccctgacgagcacagcctgcagggctccgacatggaggatgagcgggaccgggactcctaccactcctgccacagctcggtcagctaccacaaagactcgcctcgctgggaccaggatgaggaagagctggaggaggacctggaggacttcctggaggaggaggagctgcctgaagatgaggaggagctggaggaggaggaggaggaggtgcctgacgatttgggcagctatgcccagcgtgaagacgtagctgtggctgagcccaaagacttcaaacgcatcagcctcccgccagctgccccagggaaggaggacaaggccccagtggcacccaccgaggcccccgacatggccaaggtggcccccaagccagccacgcccgacaaggtgcctgcagctgagcagatccctgaggctgagccacccaaggacgaggagagtttcaggccgagagaggatgaggaaggccaggaggggcaggactccatgtccagggccaaggccaactggctgcgtgccttcaacaaggtgcggatgcagctgcaggaggcccggggagaaggagagatgtctaaatccctatggttcaaaggcggcccagggggcggtctcatcatcatcgacagcatgccagacatccgcaagaggaaacctatcccactcgtgagcgacttggccatgtccctggtccagtccaggaaagcgggcatcacctcggccttggcctccagcacgttgaacaacgaggagctgaaaaaccacgtttacaagaagaccctgcaagccttaatctaccccatctcgtgcacgacgccacacaacttcgaagtgtggacggccaccacgcccacctactgctacgagtgcgaggggctgctgtggggcatcgcgaggcagggcatgcgctgcaccgagtgcggtgtcaagtgccacgagaagtgccaggacctgctcaacgccgactgcctgcagcgggctgcggagaagagctccaagcacggggcggaggaccggacacagaacatcatcatggtgctcaaggaccgcatgaagatccgggagcgcaacaagcccgagatcttcgagctcatccaggagatcttcgcggtgaccaagacggcgcacacgcagcagatgaaggcggtcaagcagagcgtgctggacggcacgtccaagtggtccgccaagatcagcatcaccgtggtctgcgcccagggcttgcaggcaaaggacaagacaggatccagtgacccctatgtcaccgtccaggtcgggaagaccaagaaacggacaaaaaccatctatgggaacctcaacccggtgtgggaggagaatttccactttgaatgtcacaattcctccgaccgcatcaaggtgcgcgtctgggacgaggatgacgacatcaaatcccgcgtgaaacagaggttcaagagggaatctgacgatttcctggggcagacgatcattgaggtgcggacgctcagcggcgagatggacgtgtggtacaacctggacaagcgaactgacaaatctgccgtgtcgggtgccatccggctccacatcagtgtggagatcaaaggcgaggagaaggtggccccgtaccatgtccagtacacctgtctgcatgagaacctgttccacttcgtgaccgacgtgcagaacaatggggtcgtgaagatcccagatgccaagggtgacgatgcctggaaggtttactacgatgagacagcccaggagattgtggacgagtttgccatgcgctacggcgtcgagtccatctaccaagccatgacccactttgcctgcctctcctccaagtatatgtgcccaggggtgcctgccgtcatgagcaccctgctcgccaacatcaatgcctactacgcacacaccaccgcctccaccaacgtgtctgcctccgaccgcttcgccgcctccaactttgggaaagagcgcttcgtgaaactcctggaccagctgcataactccctgcggattgacctctccatgtaccggaataacttcccagccagcagcccggagagactccaggacctcaaatccactgtggaccttctcaccagcatcaccttctttcggatgaaggtacaagaactccagagcccgccccgagccagccaggtggtaaaggactgtgtgaaagcctgccttaattctacctacgagtacatcttcaataactgccatgaactgtacagccgggagtaccagacagacccggccaagaagggggaagttctcccagaggaacaggggcccagcatcaagaacctcgacttctggtccaagctgattaccctcatagtgtccatcattgaggaagacaagaattcctacactccctgcctcaaccagtttccccaggagctgaatgtgggtaaaatcagcgctgaagtgatgtggaatctgtttgcccaagacatgaagtacgccatggaggagcacgacaagcatcgtctatgcaagagtgccgactacatgaacctccacttcaaggtgaaatggctctacaatgagtatgtgacggaacttcccgccttcaaggaccgcgtgcctgagtaccctgcatggtttgaacccttcgtcatccagtggctggatgagaatgaggaggtgtcccgggatttcctgcacggtgccctggagcgagacaagaaggatgggttccagcagacctcagagcatgccctattctcctgctccgtggtggatgttttctcccaactcaaccagagctttgaaatcatcaagaaactcgagtgtcccgaccctcagatcgtggggcactacatgaggcgctttgccaagaccatcagtaatgtgctcctccagtatgcagacatcatctccaaggactttgcctcctactgctccaaggagaaggagaaagtgccctgcattctcatgaataacactcaacagctacgagttcagctggagaagatgttcgaagccatgggaggaaaggagctggatgctgaagccagtgacatcctgaaggagcttcaggtgaaactcaataacgtcttggatgagctcagccgggtgtttgctaccagcttccagccgcacattgaagagtgtgtcaaacagatgggtgacatccttagccaggttaagggcacaggcaatgtgccagccagtgcctgcagcagcgtggcccaggacgcggacaatgtgttgcagcccatcatggacctgctggacagcaacctgaccctctttgccaaaatctgtgagaagactgtgctgaagcgagtgctgaaggagctgtggaagctggttatgaacaccatggagaaaaccatcgtcctgccgcccctcactgaccagacgatgatcgggaacctcttgagaaaacatggcaagggattagaaaagggcagggtgaaattgccaagccactcagacggaacccagatgatcttcaatgcagccaaggagctgggtcagctgtccaaactcaaggatcacatggtacgagaagaagccaagagcttgaccccaaagcagtgcgcggttgttgagttggccctggacaccatcaagcaatatttccacgcgggtggcgtgggcctcaagaagaccttcctggagaagagcccggacctgcaatccttgcgctatgccctgtcgctctacacgcaggccaccgacctgctaatcaagacctttgtacagacgcaatcggcccagggcttgggtgtagaagaccctgtgggtgaagtctctgtccatgttgagctgttcactcatccaggaactggggaacacaaggtcacagtgaaagtggtggctgccaatgacctcaagtggcagacttctggcatcttccggccgttcatcgaggtcaacatcattgggccccagctcagcgacaagaaacgcaagtttgcgaccaaatccaagaacaatagctgggctcccaagtacaatgagagcttccagttcacgctgagcgccgacgcgggtcccgagtgctatgagctgcaggtgtgcgtcaaggactactgcttcgcgcgcgaggaccgcacggtggggctggccgtgctgcagctgcgtgagctggcccagcgcgggagcgccgcctgctggctgccgctcggccgccgcatccacatggacgacacgggcctcacggtgctgcgaatcctctcgcagcgcagcaacgacgaggtggccaaggagttcgtgaagctcaagtcggacacgcgctccgccgaggagggcggtgccgcgcctgcgccttagcgcgggcggtcggccgagcggcactgcgcctgcgcggagggcgctgggcggggagggacggggcttgcgccttggtgggacctccccaggggcggggctcggggggctccacgccaagggtgggctgcgcctacgcccttgactcagctttcccttttggggaattaggaatggaggatgccccgccctctcgggaggccacgcccaagggcgcgacgaaggaaggagccacatccccaacttgaggccacgcccccagcacctagggggcattttgagctgggatgggggaaacctcgtccctatggaggaggccacatcccggggctctggtaccgggaggcaccacctcatgtcccctggaaaagccataagatgggacccagacccctgggaccccagaccaattgccaagtatggaaatctcagctccctcgagggggggccctgggcaaggggtagggctctctggagcgcccctctaggtggcctggggactggagggaccaggatgctggttggagggccccggaataccggagtccctttagatatttgtgcaaaaaataaatggggggaggggggaggatgggatttcaaaagcacatgcgcccttgggcgcccaaaccctgggggccgaggggacggctctggttccccacgctgcccctacttccctttgggagtttgcctctccctctcccccaacaaacccagtcctcatatcatagagttcaacacacccatttgacagatggcaaaactgaggcttaaagagctgcttgagacttggccaaggttccaggtgccataccctctgtgcccctcccttaggcctgtgtgccccatggaagggtgggctgagatcgggatgacctgacacagctccctattgctgctaattccccctcggcctcctccaaggggtgggaattccaggccaagacccctacttcgcctttccttctccggctgccaagcaggacctttgccctcagccctttctcctgggatctccatgggggatgccatgagggcctcccaccacaaaagagaatttgggatcccctggtcccaggtttctccatcccttcttccttttccagaattttccaaataggaaagaacagaaggagaccagaaactctaggggggagaaagagaatgagagaaagagaatgagagagagagaaacacaaacacagtgacacagtgagagcttagtctccaagagcctattcattgattcaaacacccaagccacaggatacctcagatggccctcttgccagctggaagctctttctccaatgagcaaagttacagtgacctggctggagttacctggtgcacataggaccttaggggaaagttcagcgtggactacacttgctctgggatctgcttttccacatgtgtgtatggcacgcctttttctgctggattgggaaggacaagattttgctgtgctagggagaaatgaaaacggggtgagctgagtagctgggtttctggaggatagaacatcagatggggaggctttccgaggtgaagaatgagagggaaccacttactagagagaaaagagctccaggcctggggaacagcacgtgcgaaggccaggagagaagaactgttgaaacaacgagaagggtggcacggctggagctgagccagcaagggggatcgtgaggagccttggggttggggagatctgcagaagcatcagaccaggcagggcctcgtacgcagtcctgaggagttttacttttattctaagacagttggggagctccaggagctgttttaagttggggagagactggattccagcctgcaaaagctgttttgtgaagactaaaaccagtgaggagaggtggaggtgctttggggacactgaaatggattcttggaaagattctgaaggctgtgttgaaaagacacctatagctgtggggacatgactataatcccagcatttggggagaccgaggctggcagatcacttaaggtcaggagtttgagaccagcctggccaacatggcgaaaccccatctctgctaaaaatacaaaaattagctgggtgcagtggtgcatgcctgtagtcccagctactcaggagactgaggcgggagaattgtttgaaccctggaggcagaggttgtagtgagtcgtgatcacacaactgcactccagcctgggcaacagaacaatactccattccctcccctctaccccaccaaaaaaaaaaaaaaatcctgcccttagatgagctctagggctgctgagtacagttgtcccagttgcacagtgcccaagggtttggcattgctaagaaggccacgtgcaaatcctagatattgagtgttgtatgtttgtgacgttggtttcccgacatgtgaatggcccaagtgtctggaagaagtggcgccactttctaatttgcttggagatgttgcatgtcccttaaattcagacaggtgcaggtaactggaggttctgaaccaaaggttaaaatgcaaattctcatacagggttgggaagttgtagccagggataagcttatgtgactgttatatggactgaggagcagatgtgaatttcgaaccatgacatggctgagggtaggggtcgggtggatggatgattcagggttgtaacccatagagcccaaaggggaagtgatctgtgacctggggtgagggtgatctggaagatttttggatggctggaaagaaatggggaagtcgagctgcctgagagagccaagttatttcccaaaagattccttaggagtctttctgttcaagacctccgtgtgtgtgtgtgtgtgtttagggttccccagcaatggcccaggcatgtgaaggaaacaagcttcttcagggaatatttgttgaatgagttttcctgactcccaggctagaactgtttttgcaatttccaccctcttttctttcccccagagaactcctattcgtccttcaaaacccatcacggaaacccctcttggagaaaaccctccttccttcccctcaggactttcccagccaccgtctctcctccagtccagcctgatgccatgggactgggggtttctctgtccagctctgtttctcccagactggggtctgaggactctcaggacccccaactttacctagcacaggctgggcacaagtgggtgacagggagtctacgcctagtggaattatgtattggggcagggtcagtgtgagaatacacatccgcatgcatgtctgtccatgtctgtccgtaccaaccttccccttccacacggacctgggcacataggaggtgtctgagcctgacacatgggacagagagtggacatggctgagacacggacagagaaaagacaaggagtccagggggctgaaagccttttgaaatcaggaagttcctgtattggcagaacaaagcccagagaggagcagggctttcctcaacgccacccagcaagtggacacagagcccggccttggatgacacctccagggttctgaaccctggacctcgctttatgcaaggagctggccccacatttccatgaatcggggaaacagcacaagaaggttggcctgtggcagggcaagggttaaaggggtgacattgagggatgcctcagagtcaaagtcccctgaccaagaggaatagagtagaaaacacagagacagagggtgagatcacgccccgatgaggacggagagagacagagatggagagagacatagaggtggaaatatacagagaaagataaatgcagagaccaaggcagggagtgtcgggggaagtaaagagggtgtcctgaagaaagaaggatctgttcactcttaccagtctgtcctcgaatgatttgcataaaatgaggaggtgcctgtccacacccccaattcctctctcaggccccagagcctgagacctcaccatgcccccatcagagatgcaaaaaactaaacacccaactagaaatccttgggacctctctcggctgggatctcagagcctttctgtcccctacccctaccccatgtgctgtcgattttgcagatggggacaacctggggcctcccggaactctgccaccctggggaagttgggggagggccttagtcccggatcacaaccccgtctgctccccagaatcctttcctaagaatcgttgaggaccaaagttgtctttgctgacacgtgttgcttttctctttgccttttattgtttcagagaaaaatcaagttgactgtgtcaagtaacaccccaccccttacccccgtccagccatagtggctctctggagacacaggtcacaggcggagggtcccctgatcatccccaaccacacagccagggggacttgacccctgtccacccctgtctcgtgctccctcagacccccacaaaccggccaagcagtccggggaggcttcccctccacacaactcttagcatgtgattgcagatgtgaaatcaaaacgttgtttgttttttgttttgttttgattctaccccgtcggtccagtgtctgcacagacgccttcatttctctgtaaatatgtgacttggaacaaatgtttaacacaaacgagaagtggtcatgaatgcatggtgttgagatgttttgcactattctgactttttggtctctgtaaaaatattttattaacagcagacattaaaaaaagaaaaaccacacaca

SEQ ID NO: 814 - DNA, 9916 bp, Homo sapiens
  source 1..9916: mol_type = genomic DNA
gcccccggtgctgaaccaagatggccggtggcggccgggccccggcgtgagccaagcgcgggctgcagccgggagatgccccagcccagcggccgctgagcccgacccgacagagccggcccggccgcctccggcccacctgcgagctcggagacatgtctctgctttgcgttggagtcaaaaaagccaagtttgatggtgcccaagagaaattcaacacgtacgtgaccctgaaagtgcagaatgtcaagagcacgaccatcgcggtgcggggcagccagcccagctgggagcaggatttcatgttcgagattaaccgtctggatttgggactgacggtggaggtgtggaataagggtctcatctgggacacaatggtgggcactgtgtggatcccactgaggaccatccgccagtccaatgaggagggccctggagagtggctgacgctggactcccaggtcatcatggcagacagtgagatctgtggcaccaaggaccccaccttccaccgcatcctcctggacacgcgctttgagctacccttagacattcctgaagaggaggctcgctactgggccaagaagctggagcagctcaatgctatgcgggaccaggatgaatattcgttccaagatgagcaagacaagcctctgcctgtccccagcaaccagtgctgcaactggaattattttggctggggtgagcagcacaacgatgaccccgacagtgcagtggatgatcgtgacagtgactaccgcagtgaaacgagcaacagcatcccgccgccctattatactacgtcacaacccaacgcctcagtccaccaatattctgttcgcccaccacccctgggctcccgggagtcctacagtgactccatgcacagttacgaggagttctctgagccacaagccctcagccccacgggtagcagccgctatgcctcttccggggagctgagccagggaagctctcagctgagcgaggacttcgaccctgacgagcacagcctgcagggctccgacatggaggatgagcgggaccgggactcctaccactcctgccacagctcggtcagctaccacaaagactcgcctcgctgggaccaggatgaggaagagctggaggaggacctggaggacttcctggaggaggaggagctgcctgaagatgaggaggagctggaggaggaggaggaggaggtgcctgacgatttgggcagctatgcccagcgtgaagacgtagctgtggctgagcccaaagacttcaaacgcatcagcctcccgccagctgccccagggaaggaggacaaggccccagtggcacccaccgaggcccccgacatggccaaggtggcccccaagccagccacgcccgacaaggtgcctgcagctgagcagatccctgaggctgagccacccaaggacgaggagagtttcaggccgagagaggatgaggaaggccaggaggggcaggactccatgtccagggccaaggccaactggctgcgtgccttcaacaaggtgcggatgcagctgcaggaggcccggggagaaggagagatgtctaaatccctatggttcaaaggcggcccagggggcggtctcatcatcatcgacagcatgccagacatccgcaagaggaaacctatcccactcgtgagcgacttggccatgtccctggtccagtccaggaaagcgggcatcacctcggccttggcctccagcacgttgaacaacgaggagctgaaaaaccacgtttacaagaagaccctgcaagccttaatctaccccatctcgtgcacgacgccacacaacttcgaagtgtggacggccaccacgcccacctactgctacgagtgcgaggggctgctgtggggcatcgcgaggcagggcatgcgctgcaccgagtgcggtgtcaagtgccacgagaagtgccaggacctgctcaacgccgactgcctgcagcgggctgcggagaagagctccaagcacggggcggaggaccggacacagaacatcatcatggtgctcaaggaccgcatgaagatccgggagcgcaacaagcccgagatcttcgagctcatccaggagatcttcgcggtgaccaagacggcgcacacgcagcagatgaaggcggtcaagcagagcgtgctggacggcacgtccaagtggtccgccaagatcagcatcaccgtggtctgcgcccagggcttgcaggcaaaggacaagacaggatccagtgacccctatgtcaccgtccaggtcgggaagaccaagaaacggacaaaaaccatctatgggaacctcaacccggtgtgggaggagaatttccactttgaatgtcacaattcctccgaccgcatcaaggtgcgcgtctgggacgaggatgacgacatcaaatcccgcgtgaaacagaggttcaagagggaatctgacgatttcctggggcagacgatcattgaggtgcggacgctcagcggcgagatggacgtgtggtacaacctggacaagcgaactgacaaatctgccgtgtcgggtgccatccggctccacatcagtgtggagatcaaaggcgaggagaaggtggccccgtaccatgtccagtacacctgtctgcatgagaacctgttccacttcgtgaccgacgtgcagaacaatggggtcgtgaagatcccagatgccaagggtgacgatgcctggaaggtttactacgatgagacagcccaggagattgtggacgagtttgccatgcgctacggcgtcgagtccatctaccaagccatgacccactttgcctgcctctcctccaagtatatgtgcccaggggtgcctgccgtcatgagcaccctgctcgccaacatcaatgcctactacgcacacaccaccgcctccaccaacgtgtctgcctccgaccgcttcgccgcctccaactttgggaaagagcgcttcgtgaaactcctggaccagctgcataactccctgcggattgacctctccatgtaccggaataacttcccagccagcagcccggagagactccaggacctcaaatccactgtggaccttctcaccagcatcaccttctttcggatgaaggtacaagaactccagagcccgccccgagccagccaggtggtaaaggactgtgtgaaagcctgccttaattctacctacgagtacatcttcaataactgccatgaactgtacagccgggagtaccagacagacccggccaagaagggggaagttctcccagaggaacaggggcccagcatcaagaacctcgacttctggtccaagctgattaccctcatagtgtccatcattgaggaagacaagaattcctacactccctgcctcaaccagtttccccaggagctgaatgtgggtaaaatcagcgctgaagtgatgtggaatctgtttgcccaagacatgaagtacgccatggaggagcacgacaagcatcgtctatgcaagagtgccgactacatgaacctccacttcaaggtgaaatggctctacaatgagtatgtgacggaacttcccgccttcaaggaccgcgtgcctgagtaccctgcatggtttgaacccttcgtcatccagtggctggatgagaatgaggaggtgtcccgggatttcctgcacggtgccctggagcgagacaagaaggatgggttccagcagacctcagagcatgccctattctcctgctccgtggtggatgttttctcccaactcaaccagagctttgaaatcatcaagaaactcgagtgtcccgaccctcagatcgtggggcactacatgaggcgctttgccaagaccatcagtaatgtgctcctccagtatgcagacatcatctccaaggactttgcctcctactgctccaaggagaaggagaaagtgccctgcattctcatgaataacactcaacagctacgagttcagctggagaagatgttcgaagccatgggaggaaaggagctggatgctgaagccagtgacatcctgaaggagcttcaggtgaaactcaataacgtcttggatgagctcagccgggtgtttgctaccagcttccagccgcacattgaagagtgtgtcaaacagatgggtgacatccttagccaggttaagggcacaggcaatgtgccagccagtgcctgcagcagcgtggcccaggacgcggacaatgtgttgcagcccatcatggacctgctggacagcaacctgaccctctttgccaaaatctgtgagaagactgtgctgaagcgagtgctgaaggagctgtggaagctggttatgaacaccatggagaaaaccatcgtcctgccgcccctcactgaccagacgatgatcggaacccagatgatcttcaatgcagccaaggagctgggtcagctgtccaaactcaaggatcacatggtacgagaagaagccaagagcttgaccccaaagcagtgcgcggttgttgagttggccctggacaccatcaagcaatatttccacgcgggtggcgtgggcctcaagaagaccttcctggagaagagcccggacctgcaatccttgcgctatgccctgtcgctctacacgcaggccaccgacctgctaatcaagacctttgtacagacgcaatcggcccagggcttgggtgtagaagaccctgtgggtgaagtctctgtccatgttgagctgttcactcatccaggaactggggaacacaaggtcacagtgaaagtggtggctgccaatgacctcaagtggcagacttctggcatcttccggccgttcatcgaggtcaacatcattgggccccagctcagcgacaagaaacgcaagtttgcgaccaaatccaagaacaatagctgggctcccaagtacaatgagagcttccagttcacgctgagcgccgacgcgggtcccgagtgctatgagctgcaggtgtgcgtcaaggactactgcttcgcgcgcgaggaccgcacggtggggctggccgtgctgcagctgcgtgagctggcccagcgcgggagcgccgcctgctggctgccgctcggccgccgcatccacatggacgacacgggcctcacggtgctgcgaatcctctcgcagcgcagcaacgacgaggtggccaaggagttcgtgaagctcaagtcggacacgcgctccgccgaggagggcggtgccgcgcctgcgccttagcgcgggcggtcggccgagcggcactgcgcctgcgcggagggcgctgggcggggagggacggggcttgcgccttggtgggacctccccaggggcggggctcggggggctccacgccaagggtgggctgcgcctacgcccttgactcagctttcccttttggggaattaggaatggaggatgccccgccctctcgggaggccacgcccaagggcgcgacgaaggaaggagccacatccccaacttgaggccacgcccccagcacctagggggcattttgagctgggatgggggaaacctcgtccctatggaggaggccacatcccggggctctggtaccgggaggcaccacctcatgtcccctggaaaagccataagatgggacccagacccctgggaccccagaccaattgccaagtatggaaatctcagctccctcgagggggggccctgggcaaggggtagggctctctggagcgcccctctaggtggcctggggactggagggaccaggatgctggttggagggccccggaataccggagtccctttagatatttgtgcaaaaaataaatggggggaggggggaggatgggatttcaaaagcacatgcgcccttgggcgcccaaaccctgggggccgaggggacggctctggttccccacgctgcccctacttccctttgggagtttgcctctccctctcccccaacaaacccagtcctcatatcatagagttcaacacacccatttgacagatggcaaaactgaggcttaaagagctgcttgagacttggccaaggttccaggtgccataccctctgtgcccctcccttaggcctgtgtgccccatggaagggtgggctgagatcgggatgacctgacacagctccctattgctgctaattccccctcggcctcctccaaggggtgggaattccaggccaagacccctacttcgcctttccttctccggctgccaagcaggacctttgccctcagccctttctcctgggatctccatgggggatgccatgagggcctcccaccacaaaagagaatttgggatcccctggtcccaggtttctccatcccttcttccttttccagaattttccaaataggaaagaacagaaggagaccagaaactctaggggggagaaagagaatgagagaaagagaatgagagagagagaaacacaaacacagtgacacagtgagagcttagtctccaagagcctattcattgattcaaacacccaagccacaggatacctcagatggccctcttgccagctggaagctctttctccaatgagcaaagttacagtgacctggctggagttacctggtgcacataggaccttaggggaaagttcagcgtggactacacttgctctgggatctgcttttccacatgtgtgtatggcacgcctttttctgctggattgggaaggacaagattttgctgtgctagggagaaatgaaaacggggtgagctgagtagctgggtttctggaggatagaacatcagatggggaggctttccgaggtgaagaatgagagggaaccacttactagagagaaaagagctccaggcctggggaacagcacgtgcgaaggccaggagagaagaactgttgaaacaacgagaagggtggcacggctggagctgagccagcaagggggatcgtgaggagccttggggttggggagatctgcagaagcatcagaccaggcagggcctcgtacgcagtcctgaggagttttacttttattctaagacagttggggagctccaggagctgttttaagttggggagagactggattccagcctgcaaaagctgttttgtgaagactaaaaccagtgaggagaggtggaggtgctttggggacactgaaatggattcttggaaagattctgaaggctgtgttgaaaagacacctatagctgtggggacatgactataatcccagcatttggggagaccgaggctggcagatcacttaaggtcaggagtttgagaccagcctggccaacatggcgaaaccccatctctgctaaaaatacaaaaattagctgggtgcagtggtgcatgcctgtagtcccagctactcaggagactgaggcgggagaattgtttgaaccctggaggcagaggttgtagtgagtcgtgatcacacaactgcactccagcctgggcaacagaacaatactccattccctcccctctaccccaccaaaaaaaaaaaaaaatcctgcccttagatgagctctagggctgctgagtacagttgtcccagttgcacagtgcccaagggtttggcattgctaagaaggccacgtgcaaatcctagatattgagtgttgtatgtttgtgacgttggtttcccgacatgtgaatggcccaagtgtctggaagaagtggcgccactttctaatttgcttggagatgttgcatgtcccttaaattcagacaggtgcaggtaactggaggttctgaaccaaaggttaaaatgcaaattctcatacagggttgggaagttgtagccagggataagcttatgtgactgttatatggactgaggagcagatgtgaatttcgaaccatgacatggctgagggtaggggtcgggtggatggatgattcagggttgtaacccatagagcccaaaggggaagtgatctgtgacctggggtgagggtgatctggaagatttttggatggctggaaagaaatggggaagtcgagctgcctgagagagccaagttatttcccaaaagattccttaggagtctttctgttcaagacctccgtgtgtgtgtgtgtgtgtttagggttccccagcaatggcccaggcatgtgaaggaaacaagcttcttcagggaatatttgttgaatgagttttcctgactcccaggctagaactgtttttgcaatttccaccctcttttctttcccccagagaactcctattcgtccttcaaaacccatcacggaaacccctcttggagaaaaccctccttccttcccctcaggactttcccagccaccgtctctcctccagtccagcctgatgccatgggactgggggtttctctgtccagctctgtttctcccagactggggtctgaggactctcaggacccccaactttacctagcacaggctgggcacaagtgggtgacagggagtctacgcctagtggaattatgtattggggcagggtcagtgtgagaatacacatccgcatgcatgtctgtccatgtctgtccgtaccaaccttccccttccacacggacctgggcacataggaggtgtctgagcctgacacatgggacagagagtggacatggctgagacacggacagagaaaagacaaggagtccagggggctgaaagccttttgaaatcaggaagttcctgtattggcagaacaaagcccagagaggagcagggctttcctcaacgccacccagcaagtggacacagagcccggccttggatgacacctccagggttctgaaccctggacctcgctttatgcaaggagctggccccacatttccatgaatcggggaaacagcacaagaaggttggcctgtggcagggcaagggttaaaggggtgacattgagggatgcctcagagtcaaagtcccctgaccaagaggaatagagtagaaaacacagagacagagggtgagatcacgccccgatgaggacggagagagacagagatggagagagacatagaggtggaaatatacagagaaagataaatgcagagaccaaggcagggagtgtcgggggaagtaaagagggtgtcctgaagaaagaaggatctgttcactcttaccagtctgtcctcgaatgatttgcataaaatgaggaggtgcctgtccacacccccaattcctctctcaggccccagagcctgagacctcaccatgcccccatcagagatgcaaaaaactaaacacccaactagaaatccttgggacctctctcggctgggatctcagagcctttctgtcccctacccctaccccatgtgctgtcgattttgcagatggggacaacctggggcctcccggaactctgccaccctggggaagttgggggagggccttagtcccggatcacaaccccgtctgctccccagaatcctttcctaagaatcgttgaggaccaaagttgtctttgctgacacgtgttgcttttctctttgccttttattgtttcagagaaaaatcaagttgactgtgtcaagtaacaccccaccccttacccccgtccagccatagtggctctctggagacacaggtcacaggcggagggtcccctgatcatccccaaccacacagccagggggacttgacccctgtccacccctgtctcgtgctccctcagacccccacaaaccggccaagcagtccggggaggcttcccctccacacaactcttagcatgtgattgcagatgtgaaatcaaaacgttgtttgttttttgttttgttttgattctaccccgtcggtccagtgtctgcacagacgccttcatttctctgtaaatatgtgacttggaacaaatgtttaacacaaacgagaagtggtcatgaatgcatggtgttgagatgttttgcactattctgactttttggtctctgtaaaaatattttattaacagcagacattaaaaaaagaaaaaccacacaca

SEQ ID NO: 815 - DNA, 9982 bp, Homo sapiens
  source 1..9982: mol_type = genomic DNA
gcccccggtgctgaaccaagatggccggtggcggccgggccccggcgtgagccaagcgcgggctgcagccgggagatgccccagcccagcggccgctgagcccgacccgacagagccggcccggccgcctccggcccacctgcgagctcggagacatgtctctgctttgcgttggagtcaaaaaagccaagtttgatggtgcccaagagaaattcaacacgtacgtgaccctgaaagtgcagaatgtcaagagcacgaccatcgcggtgcggggcagccagcccagctgggagcaggatttcatgttcgagattaaccgtctggatttgggactgacggtggaggtgtggaataagggtctcatctgggacacaatggtgggcactgtgtggatcccactgaggaccatccgccagtccaatgaggagggccctggagagtggctgacgctggactcccaggtcatcatggcagacagtgagatctgtggcaccaaggaccccaccttccaccgcatcctcctggacacgcgctttgagctacccttagacattcctgaagaggaggctcgctactgggccaagaagctggagcagctcaatgctatgcgggaccaggatgaatattcgttccaagatgagcaagacaagcctctgcctgtccccagcaaccagtgctgcaactggaattattttggctggggtgagcagcacaacgatgaccccgacagtgcagtggatgatcgtgacagtgactaccgcagtgaaacgagcaacagcatcccgccgccctattatactacgtcacaacccaacgcctcagtccaccaatattctgttcgcccaccacccctgggctcccgggagtcctacagtgactccatgcacagttacgaggagttctctgagccacaagccctcagccccacgggtagcagccgctatgcctcttccggggagctgagccagggaagctctcagctgagcgaggacttcgaccctgacgagcacagcctgcagggctccgacatggaggatgagcgggaccgggactcctaccactcctgccacagctcggtcagctaccacaaagactcgcctcgctgggaccaggatgaggaagagctggaggaggacctggaggacttcctggaggaggaggagctgcctgaagatgaggaggagctggaggaggaggaggaggaggtgcctgacgatttgggcagctatgcccagcgtgaagacgtagctgtggctgagcccaaagacttcaaacgcatcagcctcccgccagctgccccagggaaggaggacaaggccccagtggcacccaccgaggcccccgacatggccaaggtggcccccaagccagccacgcccgacaaggtgcctgcagctgagcagatccctgaggctgagccacccaaggacgaggagagtttcaggccgagagaggatgaggaaggccaggaggggcaggactccatgtccagggccaaggccaactggctgcgtgccttcaacaaggtgcggatgcagctgcaggaggcccggggagaaggagagatgtctaaatccctatggttcaaaggcggcccagggggcggtctcatcatcatcgacagcatgccagacatccgcaagaggaaacctatcccactcgtgagcgacttggccatgtccctggtccagtccaggaaagcgggcatcacctcggccttggcctccagcacgttgaacaacgaggagctgaaaaaccacgtttacaagaagaccctgcaagccttaatctaccccatctcgtgcacgacgccacacaacttcgaagtgtggacggccaccacgcccacctactgctacgagtgcgaggggctgctgtggggcatcgcgaggcagggcatgcgctgcaccgagtgcggtgtcaagtgccacgagaagtgccaggacctgctcaacgccgactgcctgcagcgggctgcggagaagagctccaagcacggggcggaggaccggacacagaacatcatcatggtgctcaaggaccgcatgaagatccgggagcgcaacaagcccgagatcttcgagctcatccaggagatcttcgcggtgaccaagacggcgcacacgcagcagatgaaggcggtcaagcagagcgtgctggacggcacgtccaagtggtccgccaagatcagcatcaccgtggtctgcgcccagggcttgcaggcaaaggacaagacaggatccagtgacccctatgtcaccgtccaggtcgggaagaccaagaaacggacaaaaaccatctatgggaacctcaacccggtgtgggaggagaatttccactttgaatgtcacaattcctccgaccgcatcaaggtgcgcgtctgggacgaggatgacgacatcaaatcccgcgtgaaacagaggttcaagagggaatctgacgatttcctggggcagacgatcattgaggtgcggacgctcagcggcgagatggacgtgtggtacaacctggacaagcgaactgacaaatctgccgtgtcgggtgccatccggctccacatcagtgtggagatcaaaggcgaggagaaggtggccccgtaccatgtccagtacacctgtctgcatgagaacctgttccacttcgtgaccgacgtgcagaacaatggggtcgtgaagatcccagatgccaagggtgacgatgcctggaaggtttactacgatgagacagcccaggagattgtggacgagtttgccatgcgctacggcgtcgagtccatctaccaagccatgacccactttgcctgcctctcctccaagtatatgtgcccaggggtgcctgccgtcatgagcaccctgctcgccaacatcaatgcctactacgcacacaccaccgcctccaccaacgtgtctgcctccgaccgcttcgccgcctccaactttgggaaagagcgcttcgtgaaactcctggaccagctgcataactccctgcggattgacctctccatgtaccggaataacttcccagccagcagcccggagagactccaggacctcaaatccactgtggaccttctcaccagcatcaccttctttcggatgaaggtacaagaactccagagcccgccccgagccagccaggtggtaaaggactgtgtgaaagcctgccttaattctacctacgagtacatcttcaataactgccatgaactgtacagccgggagtaccagacagacccggccaagaagggggaagttctcccagaggaacaggggcccagcatcaagaacctcgacttctggtccaagctgattaccctcatagtgtccatcattgaggaagacaagaattcctacactccctgcctcaaccagtttccccaggagctgaatgtgggtaaaatcagcgctgaagtgatgtggaatctgtttgcccaagacatgaagtacgccatggaggagcacgacaagcatcgtctatgcaagagtgccgactacatgaacctccacttcaaggtgaaatggctctacaatgagtatgtgacggaacttcccgccttcaaggaccgcgtgcctgagtaccctgcatggtttgaacccttcgtcatccagtggctggatgagaatgaggaggtgtcccgggatttcctgcacggtgccctggagcgagacaagaaggatgggttccagcagacctcagagcatgccctattctcctgctccgtggtggatgttttctcccaactcaaccagagctttgaaatcatcaagaaactcgagtgtcccgaccctcagatcgtggggcactacatgaggcgctttgccaagaccatcagtaatgtgctcctccagtatgcagacatcatctccaaggactttgcctcctactgctccaaggagaaggagaaaccctgcattctcatgaataacactcaacagctacgagttcagctggagaagatgttcgaagccatgggaggaaaggagctggatgctgaagccagtgacatcctgaaggagcttcaggtgaaactcaataacgtcttggatgagctcagccgggtgtttgctaccagcttccagccgcacattgaagagtgtgtcaaacagatgggtgacatccttagccaggttaagggcacaggcaatgtgccagccagtgcctgcagcagcgtggcccaggacgcggacaatgtgttgcagcccatcatggacctgctggacagcaacctgaccctctttgccaaaatctgtgagaagactgtgctgaagcgagtgctgaaggagctgtggaagctggttatgaacaccatggagaaaaccatcgtcctgccgcccctcactgaccagacgatgatcgggaacctcttgagaaaacatggcaagggattagaaaagggcagggtgaaattgccaagccactcagacggaacccagatgatcttcaatgcagccaaggagctgggtcagctgtccaaactcaaggatcacatggtacgagaagaagccaagagcttgaccccaaagcagtgcgcggttgttgagttggccctggacaccatcaagcaatatttccacgcgggtggcgtgggcctcaagaagaccttcctggagaagagcccggacctgcaatccttgcgctatgccctgtcgctctacacgcaggccaccgacctgctaatcaagacctttgtacagacgcaatcggcccagggcttgggtgtagaagaccctgtgggtgaagtctctgtccatgttgagctgttcactcatccaggaactggggaacacaaggtcacagtgaaagtggtggctgccaatgacctcaagtggcagacttctggcatcttccggccgttcatcgaggtcaacatcattgggccccagctcagcgacaagaaacgcaagtttgcgaccaaatccaagaacaatagctgggctcccaagtacaatgagagcttccagttcacgctgagcgccgacgcgggtcccgagtgctatgagctgcaggtgtgcgtcaaggactactgcttcgcgcgcgaggaccgcacggtggggctggccgtgctgcagctgcgtgagctggcccagcgcgggagcgccgcctgctggctgccgctcggccgccgcatccacatggacgacacgggcctcacggtgctgcgaatcctctcgcagcgcagcaacgacgaggtggccaaggagttcgtgaagctcaagtcggacacgcgctccgccgaggagggcggtgccgcgcctgcgccttagcgcgggcggtcggccgagcggcactgcgcctgcgcggagggcgctgggcggggagggacggggcttgcgccttggtgggacctccccaggggcggggctcggggggctccacgccaagggtgggctgcgcctacgcccttgactcagctttcccttttggggaattaggaatggaggatgccccgccctctcgggaggccacgcccaagggcgcgacgaaggaaggagccacatccccaacttgaggccacgcccccagcacctagggggcattttgagctgggatgggggaaacctcgtccctatggaggaggccacatcccggggctctggtaccgggaggcaccacctcatgtcccctggaaaagccataagatgggacccagacccctgggaccccagaccaattgccaagtatggaaatctcagctccctcgagggggggccctgggcaaggggtagggctctctggagcgcccctctaggtggcctggggactggagggaccaggatgctggttggagggccccggaataccggagtccctttagatatttgtgcaaaaaataaatggggggaggggggaggatgggatttcaaaagcacatgcgcccttgggcgcccaaaccctgggggccgaggggacggctctggttccccacgctgcccctacttccctttgggagtttgcctctccctctcccccaacaaacccagtcctcatatcatagagttcaacacacccatttgacagatggcaaaactgaggcttaaagagctgcttgagacttggccaaggttccaggtgccataccctctgtgcccctcccttaggcctgtgtgccccatggaagggtgggctgagatcgggatgacctgacacagctccctattgctgctaattccccctcggcctcctccaaggggtgggaattccaggccaagacccctacttcgcctttccttctccggctgccaagcaggacctttgccctcagccctttctcctgggatctccatgggggatgccatgagggcctcccaccacaaaagagaatttgggatcccctggtcccaggtttctccatcccttcttccttttccagaattttccaaataggaaagaacagaaggagaccagaaactctaggggggagaaagagaatgagagaaagagaatgagagagagagaaacacaaacacagtgacacagtgagagcttagtctccaagagcctattcattgattcaaacacccaagccacaggatacctcagatggccctcttgccagctggaagctctttctccaatgagcaaagttacagtgacctggctggagttacctggtgcacataggaccttaggggaaagttcagcgtggactacacttgctctgggatctgcttttccacatgtgtgtatggcacgcctttttctgctggattgggaaggacaagattttgctgtgctagggagaaatgaaaacggggtgagctgagtagctgggtttctggaggatagaacatcagatggggaggctttccgaggtgaagaatgagagggaaccacttactagagagaaaagagctccaggcctggggaacagcacgtgcgaaggccaggagagaagaactgttgaaacaacgagaagggtggcacggctggagctgagccagcaagggggatcgtgaggagccttggggttggggagatctgcagaagcatcagaccaggcagggcctcgtacgcagtcctgaggagttttacttttattctaagacagttggggagctccaggagctgttttaagttggggagagactggattccagcctgcaaaagctgttttgtgaagactaaaaccagtgaggagaggtggaggtgctttggggacactgaaatggattcttggaaagattctgaaggctgtgttgaaaagacacctatagctgtggggacatgactataatcccagcatttggggagaccgaggctggcagatcacttaaggtcaggagtttgagaccagcctggccaacatggcgaaaccccatctctgctaaaaatacaaaaattagctgggtgcagtggtgcatgcctgtagtcccagctactcaggagactgaggcgggagaattgtttgaaccctggaggcagaggttgtagtgagtcgtgatcacacaactgcactccagcctgggcaacagaacaatactccattccctcccctctaccccaccaaaaaaaaaaaaaaatcctgcccttagatgagctctagggctgctgagtacagttgtcccagttgcacagtgcccaagggtttggcattgctaagaaggccacgtgcaaatcctagatattgagtgttgtatgtttgtgacgttggtttcccgacatgtgaatggcccaagtgtctggaagaagtggcgccactttctaatttgcttggagatgttgcatgtcccttaaattcagacaggtgcaggtaactggaggttctgaaccaaaggttaaaatgcaaattctcatacagggttgggaagttgtagccagggataagcttatgtgactgttatatggactgaggagcagatgtgaatttcgaaccatgacatggctgagggtaggggtcgggtggatggatgattcagggttgtaacccatagagcccaaaggggaagtgatctgtgacctggggtgagggtgatctggaagatttttggatggctggaaagaaatggggaagtcgagctgcctgagagagccaagttatttcccaaaagattccttaggagtctttctgttcaagacctccgtgtgtgtgtgtgtgtgtttagggttccccagcaatggcccaggcatgtgaaggaaacaagcttcttcagggaatatttgttgaatgagttttcctgactcccaggctagaactgtttttgcaatttccaccctcttttctttcccccagagaactcctattcgtccttcaaaacccatcacggaaacccctcttggagaaaaccctccttccttcccctcaggactttcccagccaccgtctctcctccagtccagcctgatgccatgggactgggggtttctctgtccagctctgtttctcccagactggggtctgaggactctcaggacccccaactttacctagcacaggctgggcacaagtgggtgacagggagtctacgcctagtggaattatgtattggggcagggtcagtgtgagaatacacatccgcatgcatgtctgtccatgtctgtccgtaccaaccttccccttccacacggacctgggcacataggaggtgtctgagcctgacacatgggacagagagtggacatggctgagacacggacagagaaaagacaaggagtccagggggctgaaagccttttgaaatcaggaagttcctgtattggcagaacaaagcccagagaggagcagggctttcctcaacgccacccagcaagtggacacagagcccggccttggatgacacctccagggttctgaaccctggacctcgctttatgcaaggagctggccccacatttccatgaatcggggaaacagcacaagaaggttggcctgtggcagggcaagggttaaaggggtgacattgagggatgcctcagagtcaaagtcccctgaccaagaggaatagagtagaaaacacagagacagagggtgagatcacgccccgatgaggacggagagagacagagatggagagagacatagaggtggaaatatacagagaaagataaatgcagagaccaaggcagggagtgtcgggggaagtaaagagggtgtcctgaagaaagaaggatctgttcactcttaccagtctgtcctcgaatgatttgcataaaatgaggaggtgcctgtccacacccccaattcctctctcaggccccagagcctgagacctcaccatgcccccatcagagatgcaaaaaactaaacacccaactagaaatccttgggacctctctcggctgggatctcagagcctttctgtcccctacccctaccccatgtgctgtcgattttgcagatggggacaacctggggcctcccggaactctgccaccctggggaagttgggggagggccttagtcccggatcacaaccccgtctgctccccagaatcctttcctaagaatcgttgaggaccaaagttgtctttgctgacacgtgttgcttttctctttgccttttattgtttcagagaaaaatcaagttgactgtgtcaagtaacaccccaccccttacccccgtccagccatagtggctctctggagacacaggtcacaggcggagggtcccctgatcatccccaaccacacagccagggggacttgacccctgtccacccctgtctcgtgctccctcagacccccacaaaccggccaagcagtccggggaggcttcccctccacacaactcttagcatgtgattgcagatgtgaaatcaaaacgttgtttgttttttgttttgttttgattctaccccgtcggtccagtgtctgcacagacgccttcatttctctgtaaatatgtgacttggaacaaatgtttaacacaaacgagaagtggtcatgaatgcatggtgttgagatgttttgcactattctgactttttggtctctgtaaaaatattttattaacagcagacattaaaaaaagaaaaaccacacaca

SEQ ID NO: 816 - DNA, 9981 bp, Homo sapiens
  source 1..9981: mol_type = genomic DNA
gcccccggtgctgaaccaagatggccggtggcggccgggccccggcgtgagccaagcgcgggctgcagccgggagatgccccagcccagcggccgctgagcccgacccgacagagccggcccggccgcctccggcccacctgcgagctcggagacatgtctctgctttgcgttggagtcaaaaaagccaagtttgatggtgcccaagagaaattcaacacgtacgtgaccctgaaagtgcagaatgtcaagagcacgaccatcgcggtgcggggcagccagcccagctgggagcaggatttcatgttcgagattaaccgtctggatttgggactgacggtggaggtgtggaataagggtctcatctgggacacaatggtgggcactgtgtggatcccactgaggaccatccgccagtccaatgaggagggccctggagagtggctgacgctggactcccaggtcatcatggcagacagtgagatctgtggcaccaaggaccccaccttccaccgcatcctcctggacacgcgctttgagctacccttagacattcctgaagaggaggctcgctactgggccaagaagctggagcagctcaatgctatgcgggaccaggatgaatattcgttccaagatgagcaagacaagcctctgcctgtccccagcaaccagtgctgcaactggaattattttggctggggtgagcagcacaacgatgaccccgacagtgcagtggatgatcgtgacagtgactaccgcagtgaaacgagcaacagcatcccgccgccctattatactacgtcacaacccaacgcctcagtccaccaatattctgttcgcccaccacccctgggctcccgggagtcctacagtgactccatgcacagttacgaggagttctctgagccacaagccctcagccccacgggtagcagccgctatgcctcttccggggagctgagccagggaagctctcagctgagcgaggacttcgaccctgacgagcacagcctgcagggctccgacatggaggatgagcgggaccgggactcctaccactcctgccacagctcggtcagctaccacaaagactcgcctcgctgggaccaggatgaggaagagctggaggaggacctggaggacttcctggaggaggaggagctgcctgaagatgaggaggagctggaggaggaggaggaggaggtgcctgacgatttgggcagctatgcccagcgtgaagacgtagctgtggctgagcccaaagacttcaaacgcatcagcctcccgccagctgccccagggaaggaggacaaggccccagtggcacccaccgaggcccccgacatggccaaggtggcccccaagccagccacgcccgacaaggtgcctgcagctgagcagatccctgaggctgagccacccaaggacgaggagagtttcaggccgagagaggatgaggaaggccaggaggggcaggactccatgtccagggccaaggccaactggctgcgtgccttcaacaaggtgcggatgcagctgcaggaggcccggggagaaggagagatgtctaaatccctatggttcaaaggcggcccagggggcggtctcatcatcatcgacagcatgccagacatccgcaagaggaaacctatcccactcgtgagcgacttggccatgtccctggtccagtccaggaaagcgggcatcacctcggccttggcctccagcacgttgaacaacgaggagctgaaaaaccacgtttacaagaagaccctgcaagccttaatctaccccatctcgtgcacgacgccacacaacttcgaagtgtggacggccaccacgcccacctactgctacgagtgcgaggggctgctgtggggcatcgcgaggcagggcatgcgctgcaccgagtgcggtgtcaagtgccacgagaagtgccaggacctgctcaacgccgactgcctgcagcgggctgcggagaagagctccaagcacggggcggaggaccggacacagaacatcatcatggtgctcaaggaccgcatgaagatccgggagcgcaacaagcccgagatcttcgagctcatccaggagatcttcgcggtgaccaagacggcgcacacgcagcagatgaaggcggtcaagcagagcgtgctggacggcacgtccaagtggtccgccaagatcagcatcaccgtggtctgcgcccagggcttgcaggcaaaggacaagacaggatccagtgacccctatgtcaccgtccaggtcgggaagaccaagaaacggacaaaaaccatctatgggaacctcaacccggtgtgggaggagaatttccactttgaatgtcacaattcctccgaccgcatcaaggtgcgcgtctgggacgaggatgacgacatcaaatcccgcgtgaaacagaggttcaagagggaatctgacgatttcctggggcagacgatcattgaggtgcggacgctcagcggcgagatggacgtgtggtacaacctggacaagcgaactgacaaatctgccgtgtcgggtgccatccggctccacatcagtgtggagatcaaaggcgaggagaaggtggccccgtaccatgtccagtacacctgtctgcatgagaacctgttccacttcgtgaccgacgtgcagaacaatggggtcgtgaagatcccagatgccaagggtgacgatgcctggaaggtttactacgatgagacagcccaggagattgtggacgagtttgccatgcgctacggcgtcgagtccatctaccaagccatgacccactttgcctgcctctcctccaagtatatgtgcccaggggtgcctgccgtcatgagcaccctgctcgccaacatcaatgcctactacgcacacaccaccgcctccaccaacgtgtctgcctccgaccgcttcgccgcctccaactttgggaaagagcgcttcgtgaaactcctggaccagctgcataactccctgcggattgacctctccatgtaccggaataacttcccagccagcagcccggagagactccaggacctcaaatccactgtggaccttctcaccagcatcaccttctttcggatgaaggtacaagaactccagagcccgccccgagccagccaggtggtaaaggactgtgtgaaagcctgccttaattctacctacgagtacatcttcaataactgccatgaactgtacagccgggagtaccagacagacccggccaagaagggggaagttcccccagaggaacaggggcccagcatcaagaacctcgacttctggtccaagctgattaccctcatagtgtccatcattgaggaagacaagaattcctacactccctgcctcaaccagtttccccaggagctgaatgtgggtaaaatcagcgctgaagtgatgtggaatctgtttgcccaagacatgaagtacgccatggaggagcacgacaagcatcgtctatgcaagagtgccgactacatgaacctccacttcaaggtgaaatggctctacaatgagtatgtgacggaacttcccgccttcaaggaccgcgtgcctgagtaccctgcatggtttgaacccttcgtcatccagtggctggatgagaatgaggaggtgtcccgggatttcctgcacggtgccctggagcgagacaagaaggatgggttccagcagacctcagagcatgccctattctcctgctccgtggtggatgttttctcccaactcaaccagagctttgaaatcatcaagaaactcgagtgtcccgaccctcagatcgtggggcactacatgaggcgctttgccaagaccatcagtaatgtgctcctccagtatgcagacatcatctccaaggactttgcctcctactgctccaaggagaaggagaaaccctgcattctcatgaataacactcaacagctacgagttcagctggagaagatgttcgaagccatgggaggaaaggagctggatgctgaagccagtgacatcctgaaggagcttcaggtgaaactcaataacgtcttggatgagctcagccgggtgtttgctaccagcttccagccgcacattgaagagtgtgtcaaacagatgggtgacatccttagccaggttaagggcacaggcaatgtgccagccagtgcctgcagcagcgtggcccaggacgcggacaatgtgttgcagcccatcatggacctgctggacagcaacctgaccctctttgccaaaatctgtgagaagactgtgctgaagcgagtgctgaaggagctgtggaagctggttatgaacaccatggagaaaaccatcgtcctgccgcccctcactgaccagacgatgatcgggaacctcttgagaaaacatggcaagggattagaaaagggcagggtgaaattgccaagccactcagacggaacccagatgatcttcaatgcagccaaggagctgggtcagctgtccaaactcaaggatcacatggtacgagaagaagccaagagcttgaccccaaagcagtgcgcggttgttgagttggccctggacaccatcaagcaatatttccacgcgggtggcgtgggcctcaagaagaccttcctggagaagagcccggacctgcaatccttgcgctatgccctgtcgctctacacgcaggccaccgacctgctaatcaagacctttgtacagacgcaatcggcccagggcttgggtgtagaagaccctgtgggtgaagtctctgtccatgttgagctgttcactcatccaggaactggggaacacaaggtcacagtgaaagtggtggctgccaatgacctcaagtggcagacttctggcatcttccggccgttcatcgaggtcaacatcattgggccccagctcagcgacaagaaacgcaagtttgcgaccaaatccaagaacaatagctgggctcccaagtacaatgagagcttccagttcacgctgagcgccgacgcgggtcccgagtgctatgagctgcaggtgtgcgtcaaggactactgcttcgcgcgcgaggaccgcacggtggggctggccgtgctgcagctgcgtgagctggcccagcgcgggagcgccgcctgctggctgccgctcggccgccgcatccacatggacgacacgggcctcacggtgctgcgaatcctctcgcagcgcagcaacgacgaggtggccaaggagttcgtgaagctcaagtcggacacgcgctccgccgaggagggcggtgccgcgcctgcgccttagcgcgggcggtcggccgagcggcactgcgcctgcgcggagggcgctgggcggggagggacggggcttgcgccttggtgggacctccccaggggcggggctcggggggctccacgccaagggtgggctgcgcctacgcccttgactcagctttcccttttggggaattaggaatggaggatgccccgccctctcgggaggccacgcccaagggcgcgacgaaggaaggagccacatccccaacttgaggccacgcccccagcacctagggggcattttgagctgggatgggggaaacctcgtccctatggaggaggccacatcccggggctctggtaccgggaggcaccacctcatgtcccctggaaaagccataagatgggacccagacccctgggaccccagaccaattgccaagtatggaaatctcagctccctcgagggggggccctgggcaaggggtagggctctctggagcgcccctctaggtggcctggggactggagggaccaggatgctggttggagggccccggaataccggagtccctttagatatttgtgcaaaaaataaatggggggaggggggaggatgggatttcaaaagcacatgcgcccttgggcgcccaaaccctgggggccgaggggacggctctggttccccacgctgcccctacttccctttgggagtttgcctctccctctcccccaacaaacccagtcctcatatcatagagttcaacacacccatttgacagatggcaaaactgaggcttaaagagctgcttgagacttggccaaggttccaggtgccataccctctgtgcccctcccttaggcctgtgtgccccatggaagggtgggctgagatcgggatgacctgacacagctccctattgctgctaattccccctcggcctcctccaaggggtgggaattccaggccaagacccctacttcgcctttccttctccggctgccaagcaggacctttgccctcagccctttctcctgggatctccatgggggatgccatgagggcctcccaccacaaaagagaatttgggatcccctggtcccaggtttctccatcccttcttccttttccagaattttccaaataggaaagaacagaaggagaccagaaactctaggggggagaaagagaatgagagaaagagaatgagagagagagaaacacaaacacagtgacacagtgagagcttagtctccaagagcctattcattgattcaaacacccaagccacaggatacctcagatggccctcttgccagctggaagctctttctccaatgagcaaagttacagtgacctggctggagttacctggtgcacataggaccttaggggaaagttcagcgtggactacacttgctctgggatctgcttttccacatgtgtgtatggcacgcctttttctgctggattgggaaggacaagattttgctgtgctagggagaaatgaaaacggggtgagctgagtagctgggtttctggaggatagaacatcagatggggaggctttccgaggtgaagaatgagagggaaccacttactagagagaaaagagctccaggcctggggaacagcacgtgcgaaggccaggagagaagaactgttgaaacaacgagaagggtggcacggctggagctgagccagcaagggggatcgtgaggagccttggggttggggagatctgcagaagcatcagaccaggcagggcctcgtacgcagtcctgaggagttttacttttattctaagacagttggggagctccaggagctgttttaagttggggagagactggattccagcctgcaaaagctgttttgtgaagactaaaaccagtgaggagaggtggaggtgctttggggacactgaaatggattcttggaaagattctgaaggctgtgttgaaaagacacctatagctgtggggacatgactataatcccagcatttggggagaccgaggctggcagatcacttaaggtcaggagtttgagaccagcctggccaacatggcgaaaccccatctctgctaaaaatacaaaaattagctgggtgcagtggtgcatgcctgtagtcccagctactcaggagactgaggcgggagaattgtttgaaccctggaggcagaggttgtagtgagtcgtgatcacacaactgcactccagcctgggcaacagaacaatactccattccctcccctctaccccaccaaaaaaaaaaaaaatcctgcccttagatgagctccagggctgctgagtacagttgtcccagttgcacagtgcccaagggtttggcattgctaagaaggccacgtgcaaatcctagatattgagtgttgtatgtttgtgacgttggtttcccgacatgtgaatggcccaagtgtctggaagaagtggcgccactttctaatttgcttggagatgttgcatgtcccttaaattcagacaggtgcaggtaactggaggttctgaaccaaaggttaaaatgcaaattctcatacagggttgggaagttgtagccagggataagcttatgtgactgttatatggactgaggagcagatgtgaatttcgaaccatgacatggctgagggtaggggtcgggtggatggatgattcagggttgtaacccatagagcccaaaggggaagtgatctgtgacctggggtgagggtgatctggaagatttttggatggctggaaagaaatggggaagtcgagctgcctgagagagccaagttatttcccaaaagattccttaggagtctttctgttcaagacctccgtgtgtgtgtgtgtgtgtttagggttccccagcaatggcccaggcatgtgaaggaaacaagcgtcttcagggaatatttgttgaatgagttttcctgactcccaggctagaactgtttttgcaatttccaccctcttttctttcccccagagaactcctattcgtccttcaaaacccatcacggaaacccctcttggagaaaaccctccttccttcccctcaggactttcccagccaccgtctctcctccagtccagcctgatgccatgggactgggggtttctctgtccagctctgtttctcccagactggggtctgaggactctcaggacccccaactttacctagcacaggctgggcacaagtgggtgacagggagtctacgcctagtggaattatgtattggggcagggtcagtgtgagaatacacatccgcatgcatgtctgtccatgtctgtccgtaccaaccttccccttccacacggacctgggcacataggaggtgtctgagcctgacacatgggacagagagtggacatggctgagacacggacagagaaaagacaaggagtccagggggctgaaagccttttgaaatcaggaagttcctgtattggcagaacaaagcccagagaggagcagggctttcctcaacgccacccagcaagtggacacagagcccggccttggatgacacctccagggttctgaaccctggacctcgctttatgcaaggagctggccccacatttccatgaatcggggaaacagcacaagaaggttggcctgtggcagggcaagggttaaaggggtgacattgagggatgcctcagagtcaaagtcccctgaccaagaggaatagagtagaaaacacagagacagagggtgagatcacgccccgatgaggacggagagagacagagatggagagagacatagaggtggaaatatacagagaaagataaatgcagagaccaaggcagggagtgtcgggggaagtaaagagggtgtcctgaagaaagaaggatctgttcactcttaccagtctgtcctcgaatgatttgcataaaatgaggaggtgcctgtccacacccccaattcctctctcaggccccagagcctgagacctcaccatgcccccatcagagatgcaaaaaactaaacacccaactagaaatccttgggacctctctcggctgggatctcagagcctttctgtcccctacccctaccccatgtgctgtcgattttgcagatggggacaacctggggcctcccggaactctgccaccctggggaagttgggggagggccttagtcccggatcacaaccccgtctgctccccagaatcctttcctaagaatcgttgaggaccaaagttgtctttgctgacacgtgttgcttttctctttgccttttattgtttcagagaaaaatcaagttgactgtgtcaagtaacaccccaccccttacccccgtccagccatagtggctctctggagacacaggtcacaggcggagggtcccctgatcatccccaaccacacagccagggggacttgacccctgtccacccctgtctcgtgctccctcagacccccacaaaccggccaagcagtccggggaggcttcccctccacacaactcttagcatgtgattgcagatgtgaaatcaaaacgttgtttgttttttgttttgttttgattctaccccgtcggtccagtgtctgcacagacgccttcatttctctgtaaatatgtgacttggaacaaatgtttaacacaaacgagaagtggtcatgaatgcatggtgttgagatgttttgcactattctgactttttggtctctgtaaaaatattttattaacagcagacattaaaaaaagaaaaaccacacaca

SEQ ID NO: 817 - DNA, 9954 bp, Homo sapiens
  source 1..9954: mol_type = genomic DNA
gcccccggtgctgaaccaagatggccggtggcggccgggccccggcgtgagccaagcgcgggctgcagccgggagatgccccagcccagcggccgctgagcccgacccgacagagccggcccggccgcctccggcccacctgcgagctcggagacatgtctctgctttgcgttggagagaaattcaacacgtacgtgaccctgaaagtgcagaatgtcaagagcacgaccatcgcggtgcggggcagccagcccagctgggagcaggatttcatgttcgagattaaccgtctggatttgggactgacggtggaggtgtggaataagggtctcatctgggacacaatggtgggcactgtgtggatcccactgaggaccatccgccagtccaatgaggagggccctggagagtggctgacgctggactcccaggtcatcatggcagacagtgagatctgtggcaccaaggaccccaccttccaccgcatcctcctggacacgcgctttgagctacccttagacattcctgaagaggaggctcgctactgggccaagaagctggagcagctcaatgctatgcgggaccaggatgaatattcgttccaagatgagcaagacaagcctctgcctgtccccagcaaccagtgctgcaactggaattattttggctggggtgagcagcacaacgatgaccccgacagtgcagtggatgatcgtgacagtgactaccgcagtgaaacgagcaacagcatcccgccgccctattatactacgtcacaacccaacgcctcagtccaccaatattctgttcgcccaccacccctgggctcccgggagtcctacagtgactccatgcacagttacgaggagttctctgagccacaagccctcagccccacgggtagcagccgctatgcctcttccggggagctgagccagggaagctctcagctgagcgaggacttcgaccctgacgagcacagcctgcagggctccgacatggaggatgagcgggaccgggactcctaccactcctgccacagctcggtcagctaccacaaagactcgcctcgctgggaccaggatgaggaagagctggaggaggacctggaggacttcctggaggaggaggagctgcctgaagatgaggaggagctggaggaggaggaggaggaggtgcctgacgatttgggcagctatgcccagcgtgaagacgtagctgtggctgagcccaaagacttcaaacgcatcagcctcccgccagctgccccagggaaggaggacaaggccccagtggcacccaccgaggcccccgacatggccaaggtggcccccaagccagccacgcccgacaaggtgcctgcagctgagcagatccctgaggctgagccacccaaggacgaggagagtttcaggccgagagaggatgaggaaggccaggaggggcaggactccatgtccagggccaaggccaactggctgcgtgccttcaacaaggtgcggatgcagctgcaggaggcccggggagaaggagagatgtctaaatccctatggttcaaaggcggcccagggggcggtctcatcatcatcgacagcatgccagacatccgcaagaggaaacctatcccactcgtgagcgacttggccatgtccctggtccagtccaggaaagcgggcatcacctcggccttggcctccagcacgttgaacaacgaggagctgaaaaaccacgtttacaagaagaccctgcaagccttaatctaccccatctcgtgcacgacgccacacaacttcgaagtgtggacggccaccacgcccacctactgctacgagtgcgaggggctgctgtggggcatcgcgaggcagggcatgcgctgcaccgagtgcggtgtcaagtgccacgagaagtgccaggacctgctcaacgccgactgcctgcagcgggctgcggagaagagctccaagcacggggcggaggaccggacacagaacatcatcatggtgctcaaggaccgcatgaagatccgggagcgcaacaagcccgagatcttcgagctcatccaggagatcttcgcggtgaccaagacggcgcacacgcagcagatgaaggcggtcaagcagagcgtgctggacggcacgtccaagtggtccgccaagatcagcatcaccgtggtctgcgcccagggcttgcaggcaaaggacaagacaggatccagtgacccctatgtcaccgtccaggtcgggaagaccaagaaacggacaaaaaccatctatgggaacctcaacccggtgtgggaggagaatttccactttgaatgtcacaattcctccgaccgcatcaaggtgcgcgtctgggacgaggatgacgacatcaaatcccgcgtgaaacagaggttcaagagggaatctgacgatttcctggggcagacgatcattgaggtgcggacgctcagcggcgagatggacgtgtggtacaacctggacaagcgaactgacaaatctgccgtgtcgggtgccatccggctccacatcagtgtggagatcaaaggcgaggagaaggtggccccgtaccatgtccagtacacctgtctgcatgagaacctgttccacttcgtgaccgacgtgcagaacaatggggtcgtgaagatcccagatgccaagggtgacgatgcctggaaggtttactacgatgagacagcccaggagattgtggacgagtttgccatgcgctacggcgtcgagtccatctaccaagccatgacccactttgcctgcctctcctccaagtatatgtgcccaggggtgcctgccgtcatgagcaccctgctcgccaacatcaatgcctactacgcacacaccaccgcctccaccaacgtgtctgcctccgaccgcttcgccgcctccaactttgggaaagagcgcttcgtgaaactcctggaccagctgcataactccctgcggattgacctctccatgtaccggaataacttcccagccagcagcccggagagactccaggacctcaaatccactgtggaccttctcaccagcatcaccttctttcggatgaaggtacaagaactccagagcccgccccgagccagccaggtggtaaaggactgtgtgaaagcctgccttaattctacctacgagtacatcttcaataactgccatgaactgtacagccgggagtaccagacagacccggccaagaagggggaagttcccccagaggaacaggggcccagcatcaagaacctcgacttctggtccaagctgattaccctcatagtgtccatcattgaggaagacaagaattcctacactccctgcctcaaccagtttccccaggagctgaatgtgggtaaaatcagcgctgaagtgatgtggaatctgtttgcccaagacatgaagtacgccatggaggagcacgacaagcatcgtctatgcaagagtgccgactacatgaacctccacttcaaggtgaaatggctctacaatgagtatgtgacggaacttcccgccttcaaggaccgcgtgcctgagtaccctgcatggtttgaacccttcgtcatccagtggctggatgagaatgaggaggtgtcccgggatttcctgcacggtgccctggagcgagacaagaaggatgggttccagcagacctcagagcatgccctattctcctgctccgtggtggatgttttctcccaactcaaccagagctttgaaatcatcaagaaactcgagtgtcccgaccctcagatcgtggggcactacatgaggcgctttgccaagaccatcagtaatgtgctcctccagtatgcagacatcatctccaaggactttgcctcctactgctccaaggagaaggagaaagtgccctgcattctcatgaataacactcaacagctacgagttcagctggagaagatgttcgaagccatgggaggaaaggagctggatgctgaagccagtgacatcctgaaggagcttcaggtgaaactcaataacgtcttggatgagctcagccgggtgtttgctaccagcttccagccgcacattgaagagtgtgtcaaacagatgggtgacatccttagccaggttaagggcacaggcaatgtgccagccagtgcctgcagcagcgtggcccaggacgcggacaatgtgttgcagcccatcatggacctgctggacagcaacctgaccctctttgccaaaatctgtgagaagactgtgctgaagcgagtgctgaaggagctgtggaagctggttatgaacaccatggagaaaaccatcgtcctgccgcccctcactgaccagacgatgatcgggaacctcttgagaaaacatggcaagggattagaaaagggcagggtgaaattgccaagccactcagacggaacccagatgatcttcaatgcagccaaggagctgggtcagctgtccaaactcaaggatcacatggtacgagaagaagccaagagcttgaccccaaagcagtgcgcggttgttgagttggccctggacaccatcaagcaatatttccacgcgggtggcgtgggcctcaagaagaccttcctggagaagagcccggacctgcaatccttgcgctatgccctgtcgctctacacgcaggccaccgacctgctaatcaagacctttgtacagacgcaatcggcccagggcttgggtgtagaagaccctgtgggtgaagtctctgtccatgttgagctgttcactcatccaggaactggggaacacaaggtcacagtgaaagtggtggctgccaatgacctcaagtggcagacttctggcatcttccggccgttcatcgaggtcaacatcattgggccccagctcagcgacaagaaacgcaagtttgcgaccaaatccaagaacaatagctgggctcccaagtacaatgagagcttccagttcacgctgagcgccgacgcgggtcccgagtgctatgagctgcaggtgtgcgtcaaggactactgcttcgcgcgcgaggaccgcacggtggggctggccgtgctgcagctgcgtgagctggcccagcgcgggagcgccgcctgctggctgccgctcggccgccgcatccacatggacgacacgggcctcacggtgctgcgaatcctctcgcagcgcagcaacgacgaggtggccaaggagttcgtgaagctcaagtcggacacgcgctccgccgaggagggcggtgccgcgcctgcgccttagcgcgggcggtcggccgagcggcactgcgcctgcgcggagggcgctgggcggggagggacggggcttgcgccttggtgggacctccccaggggcggggctcggggggctccacgccaagggtgggctgcgcctacgcccttgactcagctttcccttttggggaattaggaatggaggatgccccgccctctcgggaggccacgcccaagggcgcgacgaaggaaggagccacatccccaacttgaggccacgcccccagcacctagggggcattttgagctgggatgggggaaacctcgtccctatggaggaggccacatcccggggctctggtaccgggaggcaccacctcatgtcccctggaaaagccataagatgggacccagacccctgggaccccagaccaattgccaagtatggaaatctcagctccctcgagggggggccctgggcaaggggtagggctctctggagcgcccctctaggtggcctggggactggagggaccaggatgctggttggagggccccggaataccggagtccctttagatatttgtgcaaaaaataaatggggggaggggggaggatgggatttcaaaagcacatgcgcccttgggcgcccaaaccctgggggccgaggggacggctctggttccccacgctgcccctacttccctttgggagtttgcctctccctctcccccaacaaacccagtcctcatatcatagagttcaacacacccatttgacagatggcaaaactgaggcttaaagagctgcttgagacttggccaaggttccaggtgccataccctctgtgcccctcccttaggcctgtgtgccccatggaagggtgggctgagatcgggatgacctgacacagctccctattgctgctaattccccctcggcctcctccaaggggtgggaattccaggccaagacccctacttcgcctttccttctccggctgccaagcaggacctttgccctcagccctttctcctgggatctccatgggggatgccatgagggcctcccaccacaaaagagaatttgggatcccctggtcccaggtttctccatcccttcttccttttccagaattttccaaataggaaagaacagaaggagaccagaaactctaggggggagaaagagaatgagagaaagagaatgagagagagagaaacacaaacacagtgacacagtgagagcttagtctccaagagcctattcattgattcaaacacccaagccacaggatacctcagatggccctcttgccagctggaagctctttctccaatgagcaaagttacagtgacctggctggagttacctggtgcacataggaccttaggggaaagttcagcgtggactacacttgctctgggatctgcttttccacatgtgtgtatggcacgcctttttctgctggattgggaaggacaagattttgctgtgctagggagaaatgaaaacggggtgagctgagtagctgggtttctggaggatagaacatcagatggggaggctttccgaggtgaagaatgagagggaaccacttactagagagaaaagagctccaggcctggggaacagcacgtgcgaaggccaggagagaagaactgttgaaacaacgagaagggtggcacggctggagctgagccagcaagggggatcgtgaggagccttggggttggggagatctgcagaagcatcagaccaggcagggcctcgtacgcagtcctgaggagttttacttttattctaagacagttggggagctccaggagctgttttaagttggggagagactggattccagcctgcaaaagctgttttgtgaagactaaaaccagtgaggagaggtggaggtgctttggggacactgaaatggattcttggaaagattctgaaggctgtgttgaaaagacacctatagctgtggggacatgactataatcccagcatttggggagaccgaggctggcagatcacttaaggtcaggagtttgagaccagcctggccaacatggcgaaaccccatctctgctaaaaatacaaaaattagctgggtgcagtggtgcatgcctgtagtcccagctactcaggagactgaggcgggagaattgtttgaaccctggaggcagaggttgtagtgagtcgtgatcacacaactgcactccagcctgggcaacagaacaatactccattccctcccctctaccccaccaaaaaaaaaaaaaatcctgcccttagatgagctccagggctgctgagtacagttgtcccagttgcacagtgcccaagggtttggcattgctaagaaggccacgtgcaaatcctagatattgagtgttgtatgtttgtgacgttggtttcccgacatgtgaatggcccaagtgtctggaagaagtggcgccactttctaatttgcttggagatgttgcatgtcccttaaattcagacaggtgcaggtaactggaggttctgaaccaaaggttaaaatgcaaattctcatacagggttgggaagttgtagccagggataagcttatgtgactgttatatggactgaggagcagatgtgaatttcgaaccatgacatggctgagggtaggggtcgggtggatggatgattcagggttgtaacccatagagcccaaaggggaagtgatctgtgacctggggtgagggtgatctggaagatttttggatggctggaaagaaatggggaagtcgagctgcctgagagagccaagttatttcccaaaagattccttaggagtctttctgttcaagacctccgtgtgtgtgtgtgtgtgtttagggttccccagcaatggcccaggcatgtgaaggaaacaagcgtcttcagggaatatttgttgaatgagttttcctgactcccaggctagaactgtttttgcaatttccaccctcttttctttcccccagagaactcctattcgtccttcaaaacccatcacggaaacccctcttggagaaaaccctccttccttcccctcaggactttcccagccaccgtctctcctccagtccagcctgatgccatgggactgggggtttctctgtccagctctgtttctcccagactggggtctgaggactctcaggacccccaactttacctagcacaggctgggcacaagtgggtgacagggagtctacgcctagtggaattatgtattggggcagggtcagtgtgagaatacacatccgcatgcatgtctgtccatgtctgtccgtaccaaccttccccttccacacggacctgggcacataggaggtgtctgagcctgacacatgggacagagagtggacatggctgagacacggacagagaaaagacaaggagtccagggggctgaaagccttttgaaatcaggaagttcctgtattggcagaacaaagcccagagaggagcagggctttcctcaacgccacccagcaagtggacacagagcccggccttggatgacacctccagggttctgaaccctggacctcgctttatgcaaggagctggccccacatttccatgaatcggggaaacagcacaagaaggttggcctgtggcagggcaagggttaaaggggtgacattgagggatgcctcagagtcaaagtcccctgaccaagaggaatagagtagaaaacacagagacagagggtgagatcacgccccgatgaggacggagagagacagagatggagagagacatagaggtggaaatatacagagaaagataaatgcagagaccaaggcagggagtgtcgggggaagtaaagagggtgtcctgaagaaagaaggatctgttcactcttaccagtctgtcctcgaatgatttgcataaaatgaggaggtgcctgtccacacccccaattcctctctcaggccccagagcctgagacctcaccatgcccccatcagagatgcaaaaaactaaacacccaactagaaatccttgggacctctctcggctgggatctcagagcctttctgtcccctacccctaccccatgtgctgtcgattttgcagatggggacaacctggggcctcccggaactctgccaccctggggaagttgggggagggccttagtcccggatcacaaccccgtctgctccccagaatcctttcctaagaatcgttgaggaccaaagttgtctttgctgacacgtgttgcttttctctttgccttttattgtttcagagaaaaatcaagttgactgtgtcaagtaacaccccaccccttacccccgtccagccatagtggctctctggagacacaggtcacaggcggagggtcccctgatcatccccaaccacacagccagggggacttgacccctgtccacccctgtctcgtgctccctcagacccccacaaaccggccaagcagtccggggaggcttcccctccacacaactcttagcatgtgattgcagatgtgaaatcaaaacgttgtttgttttttgttttgttttgattctaccccgtcggtccagtgtctgcacagacgccttcatttctctgtaaatatgtgacttggaacaaatgtttaacacaaacgagaagtggtcatgaatgcatggtgttgagatgttttgcactattctgactttttggtctctgtaaaaatattttattaacagcagacattaaaaaaagaaaaaccacacaca

SEQ ID NO: 818 - DNA, 9915 bp, Homo sapiens
  source 1..9915: mol_type = genomic DNA
gcccccggtgctgaaccaagatggccggtggcggccgggccccggcgtgagccaagcgcgggctgcagccgggagatgccccagcccagcggccgctgagcccgacccgacagagccggcccggccgcctccggcccacctgcgagctcggagacatgtctctgctttgcgttggagtcaaaaaagccaagtttgatggtgcccaagagaaattcaacacgtacgtgaccctgaaagtgcagaatgtcaagagcacgaccatcgcggtgcggggcagccagcccagctgggagcaggatttcatgttcgagattaaccgtctggatttgggactgacggtggaggtgtggaataagggtctcatctgggacacaatggtgggcactgtgtggatcccactgaggaccatccgccagtccaatgaggagggccctggagagtggctgacgctggactcccaggtcatcatggcagacagtgagatctgtggcaccaaggaccccaccttccaccgcatcctcctggacacgcgctttgagctacccttagacattcctgaagaggaggctcgctactgggccaagaagctggagcagctcaatgctatgcgggaccaggatgaatattcgttccaagatgagcaagacaagcctctgcctgtccccagcaaccagtgctgcaactggaattattttggctggggtgagcagcacaacgatgaccccgacagtgcagtggatgatcgtgacagtgactaccgcagtgaaacgagcaacagcatcccgccgccctattatactacgtcacaacccaacgcctcagtccaccaatattctgttcgcccaccacccctgggctcccgggagtcctacagtgactccatgcacagttacgaggagttctctgagccacaagccctcagccccacgggtagcagccgctatgcctcttccggggagctgagccagggaagctctcagctgagcgaggacttcgaccctgacgagcacagcctgcagggctccgacatggaggatgagcgggaccgggactcctaccactcctgccacagctcggtcagctaccacaaagactcgcctcgctgggaccaggatgaggaagagctggaggaggacctggaggacttcctggaggaggaggagctgcctgaagatgaggaggagctggaggaggaggaggaggaggtgcctgacgatttgggcagctatgcccagcgtgaagacgtagctgtggctgagcccaaagacttcaaacgcatcagcctcccgccagctgccccagggaaggaggacaaggccccagtggcacccaccgaggcccccgacatggccaaggtggcccccaagccagccacgcccgacaaggtgcctgcagctgagcagatccctgaggctgagccacccaaggacgaggagagtttcaggccgagagaggatgaggaaggccaggaggggcaggactccatgtccagggccaaggccaactggctgcgtgccttcaacaaggtgcggatgcagctgcaggaggcccggggagaaggagagatgtctaaatccctatggttcaaaggcggcccagggggcggtctcatcatcatcgacagcatgccagacatccgcaagaggaaacctatcccactcgtgagcgacttggccatgtccctggtccagtccaggaaagcgggcatcacctcggccttggcctccagcacgttgaacaacgaggagctgaaaaaccacgtttacaagaagaccctgcaagccttaatctaccccatctcgtgcacgacgccacacaacttcgaagtgtggacggccaccacgcccacctactgctacgagtgcgaggggctgctgtggggcatcgcgaggcagggcatgcgctgcaccgagtgcggtgtcaagtgccacgagaagtgccaggacctgctcaacgccgactgcctgcagcgggctgcggagaagagctccaagcacggggcggaggaccggacacagaacatcatcatggtgctcaaggaccgcatgaagatccgggagcgcaacaagcccgagatcttcgagctcatccaggagatcttcgcggtgaccaagacggcgcacacgcagcagatgaaggcggtcaagcagagcgtgctggacggcacgtccaagtggtccgccaagatcagcatcaccgtggtctgcgcccagggcttgcaggcaaaggacaagacaggatccagtgacccctatgtcaccgtccaggtcgggaagaccaagaaacggacaaaaaccatctatgggaacctcaacccggtgtgggaggagaatttccactttgaatgtcacaattcctccgaccgcatcaaggtgcgcgtctgggacgaggatgacgacatcaaatcccgcgtgaaacagaggttcaagagggaatctgacgatttcctggggcagacgatcattgaggtgcggacgctcagcggcgagatggacgtgtggtacaacctggacaagcgaactgacaaatctgccgtgtcgggtgccatccggctccacatcagtgtggagatcaaaggcgaggagaaggtggccccgtaccatgtccagtacacctgtctgcatgagaacctgttccacttcgtgaccgacgtgcagaacaatggggtcgtgaagatcccagatgccaagggtgacgatgcctggaaggtttactacgatgagacagcccaggagattgtggacgagtttgccatgcgctacggcgtcgagtccatctaccaagccatgacccactttgcctgcctctcctccaagtatatgtgcccaggggtgcctgccgtcatgagcaccctgctcgccaacatcaatgcctactacgcacacaccaccgcctccaccaacgtgtctgcctccgaccgcttcgccgcctccaactttgggaaagagcgcttcgtgaaactcctggaccagctgcataactccctgcggattgacctctccatgtaccggaataacttcccagccagcagcccggagagactccaggacctcaaatccactgtggaccttctcaccagcatcaccttctttcggatgaaggtacaagaactccagagcccgccccgagccagccaggtggtaaaggactgtgtgaaagcctgccttaattctacctacgagtacatcttcaataactgccatgaactgtacagccgggagtaccagacagacccggccaagaagggggaagttcccccagaggaacaggggcccagcatcaagaacctcgacttctggtccaagctgattaccctcatagtgtccatcattgaggaagacaagaattcctacactccctgcctcaaccagtttccccaggagctgaatgtgggtaaaatcagcgctgaagtgatgtggaatctgtttgcccaagacatgaagtacgccatggaggagcacgacaagcatcgtctatgcaagagtgccgactacatgaacctccacttcaaggtgaaatggctctacaatgagtatgtgacggaacttcccgccttcaaggaccgcgtgcctgagtaccctgcatggtttgaacccttcgtcatccagtggctggatgagaatgaggaggtgtcccgggatttcctgcacggtgccctggagcgagacaagaaggatgggttccagcagacctcagagcatgccctattctcctgctccgtggtggatgttttctcccaactcaaccagagctttgaaatcatcaagaaactcgagtgtcccgaccctcagatcgtggggcactacatgaggcgctttgccaagaccatcagtaatgtgctcctccagtatgcagacatcatctccaaggactttgcctcctactgctccaaggagaaggagaaagtgccctgcattctcatgaataacactcaacagctacgagttcagctggagaagatgttcgaagccatgggaggaaaggagctggatgctgaagccagtgacatcctgaaggagcttcaggtgaaactcaataacgtcttggatgagctcagccgggtgtttgctaccagcttccagccgcacattgaagagtgtgtcaaacagatgggtgacatccttagccaggttaagggcacaggcaatgtgccagccagtgcctgcagcagcgtggcccaggacgcggacaatgtgttgcagcccatcatggacctgctggacagcaacctgaccctctttgccaaaatctgtgagaagactgtgctgaagcgagtgctgaaggagctgtggaagctggttatgaacaccatggagaaaaccatcgtcctgccgcccctcactgaccagacgatgatcggaacccagatgatcttcaatgcagccaaggagctgggtcagctgtccaaactcaaggatcacatggtacgagaagaagccaagagcttgaccccaaagcagtgcgcggttgttgagttggccctggacaccatcaagcaatatttccacgcgggtggcgtgggcctcaagaagaccttcctggagaagagcccggacctgcaatccttgcgctatgccctgtcgctctacacgcaggccaccgacctgctaatcaagacctttgtacagacgcaatcggcccagggcttgggtgtagaagaccctgtgggtgaagtctctgtccatgttgagctgttcactcatccaggaactggggaacacaaggtcacagtgaaagtggtggctgccaatgacctcaagtggcagacttctggcatcttccggccgttcatcgaggtcaacatcattgggccccagctcagcgacaagaaacgcaagtttgcgaccaaatccaagaacaatagctgggctcccaagtacaatgagagcttccagttcacgctgagcgccgacgcgggtcccgagtgctatgagctgcaggtgtgcgtcaaggactactgcttcgcgcgcgaggaccgcacggtggggctggccgtgctgcagctgcgtgagctggcccagcgcgggagcgccgcctgctggctgccgctcggccgccgcatccacatggacgacacgggcctcacggtgctgcgaatcctctcgcagcgcagcaacgacgaggtggccaaggagttcgtgaagctcaagtcggacacgcgctccgccgaggagggcggtgccgcgcctgcgccttagcgcgggcggtcggccgagcggcactgcgcctgcgcggagggcgctgggcggggagggacggggcttgcgccttggtgggacctccccaggggcggggctcggggggctccacgccaagggtgggctgcgcctacgcccttgactcagctttcccttttggggaattaggaatggaggatgccccgccctctcgggaggccacgcccaagggcgcgacgaaggaaggagccacatccccaacttgaggccacgcccccagcacctagggggcattttgagctgggatgggggaaacctcgtccctatggaggaggccacatcccggggctctggtaccgggaggcaccacctcatgtcccctggaaaagccataagatgggacccagacccctgggaccccagaccaattgccaagtatggaaatctcagctccctcgagggggggccctgggcaaggggtagggctctctggagcgcccctctaggtggcctggggactggagggaccaggatgctggttggagggccccggaataccggagtccctttagatatttgtgcaaaaaataaatggggggaggggggaggatgggatttcaaaagcacatgcgcccttgggcgcccaaaccctgggggccgaggggacggctctggttccccacgctgcccctacttccctttgggagtttgcctctccctctcccccaacaaacccagtcctcatatcatagagttcaacacacccatttgacagatggcaaaactgaggcttaaagagctgcttgagacttggccaaggttccaggtgccataccctctgtgcccctcccttaggcctgtgtgccccatggaagggtgggctgagatcgggatgacctgacacagctccctattgctgctaattccccctcggcctcctccaaggggtgggaattccaggccaagacccctacttcgcctttccttctccggctgccaagcaggacctttgccctcagccctttctcctgggatctccatgggggatgccatgagggcctcccaccacaaaagagaatttgggatcccctggtcccaggtttctccatcccttcttccttttccagaattttccaaataggaaagaacagaaggagaccagaaactctaggggggagaaagagaatgagagaaagagaatgagagagagagaaacacaaacacagtgacacagtgagagcttagtctccaagagcctattcattgattcaaacacccaagccacaggatacctcagatggccctcttgccagctggaagctctttctccaatgagcaaagttacagtgacctggctggagttacctggtgcacataggaccttaggggaaagttcagcgtggactacacttgctctgggatctgcttttccacatgtgtgtatggcacgcctttttctgctggattgggaaggacaagattttgctgtgctagggagaaatgaaaacggggtgagctgagtagctgggtttctggaggatagaacatcagatggggaggctttccgaggtgaagaatgagagggaaccacttactagagagaaaagagctccaggcctggggaacagcacgtgcgaaggccaggagagaagaactgttgaaacaacgagaagggtggcacggctggagctgagccagcaagggggatcgtgaggagccttggggttggggagatctgcagaagcatcagaccaggcagggcctcgtacgcagtcctgaggagttttacttttattctaagacagttggggagctccaggagctgttttaagttggggagagactggattccagcctgcaaaagctgttttgtgaagactaaaaccagtgaggagaggtggaggtgctttggggacactgaaatggattcttggaaagattctgaaggctgtgttgaaaagacacctatagctgtggggacatgactataatcccagcatttggggagaccgaggctggcagatcacttaaggtcaggagtttgagaccagcctggccaacatggcgaaaccccatctctgctaaaaatacaaaaattagctgggtgcagtggtgcatgcctgtagtcccagctactcaggagactgaggcgggagaattgtttgaaccctggaggcagaggttgtagtgagtcgtgatcacacaactgcactccagcctgggcaacagaacaatactccattccctcccctctaccccaccaaaaaaaaaaaaaatcctgcccttagatgagctccagggctgctgagtacagttgtcccagttgcacagtgcccaagggtttggcattgctaagaaggccacgtgcaaatcctagatattgagtgttgtatgtttgtgacgttggtttcccgacatgtgaatggcccaagtgtctggaagaagtggcgccactttctaatttgcttggagatgttgcatgtcccttaaattcagacaggtgcaggtaactggaggttctgaaccaaaggttaaaatgcaaattctcatacagggttgggaagttgtagccagggataagcttatgtgactgttatatggactgaggagcagatgtgaatttcgaaccatgacatggctgagggtaggggtcgggtggatggatgattcagggttgtaacccatagagcccaaaggggaagtgatctgtgacctggggtgagggtgatctggaagatttttggatggctggaaagaaatggggaagtcgagctgcctgagagagccaagttatttcccaaaagattccttaggagtctttctgttcaagacctccgtgtgtgtgtgtgtgtgtttagggttccccagcaatggcccaggcatgtgaaggaaacaagcgtcttcagggaatatttgttgaatgagttttcctgactcccaggctagaactgtttttgcaatttccaccctcttttctttcccccagagaactcctattcgtccttcaaaacccatcacggaaacccctcttggagaaaaccctccttccttcccctcaggactttcccagccaccgtctctcctccagtccagcctgatgccatgggactgggggtttctctgtccagctctgtttctcccagactggggtctgaggactctcaggacccccaactttacctagcacaggctgggcacaagtgggtgacagggagtctacgcctagtggaattatgtattggggcagggtcagtgtgagaatacacatccgcatgcatgtctgtccatgtctgtccgtaccaaccttccccttccacacggacctgggcacataggaggtgtctgagcctgacacatgggacagagagtggacatggctgagacacggacagagaaaagacaaggagtccagggggctgaaagccttttgaaatcaggaagttcctgtattggcagaacaaagcccagagaggagcagggctttcctcaacgccacccagcaagtggacacagagcccggccttggatgacacctccagggttctgaaccctggacctcgctttatgcaaggagctggccccacatttccatgaatcggggaaacagcacaagaaggttggcctgtggcagggcaagggttaaaggggtgacattgagggatgcctcagagtcaaagtcccctgaccaagaggaatagagtagaaaacacagagacagagggtgagatcacgccccgatgaggacggagagagacagagatggagagagacatagaggtggaaatatacagagaaagataaatgcagagaccaaggcagggagtgtcgggggaagtaaagagggtgtcctgaagaaagaaggatctgttcactcttaccagtctgtcctcgaatgatttgcataaaatgaggaggtgcctgtccacacccccaattcctctctcaggccccagagcctgagacctcaccatgcccccatcagagatgcaaaaaactaaacacccaactagaaatccttgggacctctctcggctgggatctcagagcctttctgtcccctacccctaccccatgtgctgtcgattttgcagatggggacaacctggggcctcccggaactctgccaccctggggaagttgggggagggccttagtcccggatcacaaccccgtctgctccccagaatcctttcctaagaatcgttgaggaccaaagttgtctttgctgacacgtgttgcttttctctttgccttttattgtttcagagaaaaatcaagttgactgtgtcaagtaacaccccaccccttacccccgtccagccatagtggctctctggagacacaggtcacaggcggagggtcccctgatcatccccaaccacacagccagggggacttgacccctgtccacccctgtctcgtgctccctcagacccccacaaaccggccaagcagtccggggaggcttcccctccacacaactcttagcatgtgattgcagatgtgaaatcaaaacgttgtttgttttttgttttgttttgattctaccccgtcggtccagtgtctgcacagacgccttcatttctctgtaaatatgtgacttggaacaaatgtttaacacaaacgagaagtggtcatgaatgcatggtgttgagatgttttgcactattctgactttttggtctctgtaaaaatattttattaacagcagacattaaaaaaagaaaaaccacacaca

SEQ ID NO: 819 - DNA, 10606 bp, Homo sapiens
  source 1..10606: mol_type = genomic DNA
atttctactacagtggcggagccgtacaggacctgtttcactgcagggggatccaaaacaagccccgtggagcagcagccagagcaacagcagccgcaagacattgtttctctccctctgcccccccttccccacgcaaccccagatccatttacactttacagttttacctcacaaaaactactacaagcaccaagctccctgatggaaaggagcatcgtgcatcaagtcaccagggtggtccattcaagctgcagatttgtttgtcatccttgtacagcaatctcctcctccactgccactacagggaagtgcatcacatgtcagcatactggagcatagtgaaagagtctattttgaagcttcaaacttagtgctgctgcagaccaggaacaagagagaaagagtggatttcagcctgcacggatggtcttgaaacacaaatggtttttggtctaggcgttttacactgagattctccactgccaccctttctactcaagcaaaatcttcgtgaaaagatctgctgcaaggaactgatagcttatggttctccattgtgatgaaagcacatggtacagttttccaaagaaattagaccattttcttcgtgagaaagaaatcgacgtgctgttttcatagggtatttctcacttctctgtgaaaggaagaaagaacacgcctgagcccaagagccctcaggagccctccagagcctgtgggaagtctccatggtgaagtataggctgaggctacctgtgaacagtacgcagtgaatgttcatccagagctgctgttggcggattgtacccacggggagatgattcctcatgaagagcctggatcccctacagaaatcaaatgtgactttccgtttatcagactaaaatcagagccatccagacagtgaaacagtcaccgtggaggggggacggcgaaaaatgaaatccaaccaagagcggagcaacgaatgcctgcctcccaagaagcgcgagatccccgccaccagccggtcctccgaggagaaggcccctaccctgcccagcgacaaccaccgggtggagggcacagcatggctcccgggcaaccctggtggccggggccacgggggcgggaggcatgggccggcagggacctcggtggagcttggtttacaacagggaataggtttacacaaagcattgtccacagggctggactactccccgcccagcgctcccaggtctgtccccgtggccaccacgctgcctgccgcgtacgccaccccgcagccagggaccccggtgtcccccgtgcagtacgctcacctgccgcacaccttccagttcattgggtcctcccaatacagtggaacctatgccagcttcatcccatcacagctgatccccccaaccgccaaccccgtcaccagtgcagtggcctcggccgcaggggccaccactccatcccagcgctcccagctggaggcctattccactctgctggccaacatgggcagtctgagccagacgccgggacacaaggctgagcagcagcagcagcagcagcagcagcagcagcagcagcatcagcatcagcagcagcagcagcagcagcagcagcagcagcagcagcagcacctcagcagggctccggggctcatcaccccggggtcccccccaccagcccagcagaaccagtacgtccacatttccagttctccgcagaacaccggccgcaccgcctctcctccggccatccccgtccacctccacccccaccagacgatgatcccacacacgctcaccctggggcccccctcccaggtcgtcatgcaatacgccgactccggcagccactttgtccctcgggaggccaccaagaaagctgagagcagccggctgcagcaggccatccaggccaaggaggtcctgaacggtgagatggagaagagccggcggtacggggccccgtcctcagccgacctgggcctgggcaaggcaggcggcaagtcggttcctcacccgtacgagtccaggcacgtggtggtccacccgagcccctcagactacagcagtcgtgatccttcgggggtccgggcctctgtgatggtcctgcccaacagcaacacgcccgcagctgacctggaggtgcaacaggccactcatcgtgaagcctccccttctaccctcaacgacaaaagtggcctgcatttagggaagcctggccaccggtcctacgcgctctcaccccacacggtcattcagaccacacacagtgcttcagagccactcccggtgggactgccagccacggccttctacgcagggactcaaccccctgtcatcggctacctgagcggccagcagcaagcaatcacctacgccggcagcctgccccagcacctggtgatccccggcacacagcccctgctcatcccggtcggcagcactgacatggaagcgtcgggggcagccccggccatagtcacgtcatccccccagtttgctgcagtgcctcacacgttcgtcaccaccgcccttcccaagagcgagaacttcaaccctgaggccctggtcacccaggccgcctacccagccatggtgcaggcccagatccacctgcctgtggtgcagtccgtggcctccccggcggcggctccccctacgctgcctccctacttcatgaaaggctccatcatccagttggccaacggggagctaaagaaggtggaagacttaaaaacagaagatttcatccagagtgcagagataagcaacgacctgaagatcgactccagcaccgtagagaggattgaagacagccatagcccgggcgtggccgtgatacagttcgccgtcggggagcaccgagcccaggtcagcgttgaagttttggtagagtatcctttttttgtgtttggacagggctggtcatcctgctgtccggagagaaccagccagctctttgatttgccgtgttccaaactctcagttggggatgtctgcatctcgcttaccctcaagaacctgaagaacggctctgttaaaaagggccagcccgtggatcccgccagcgtcctgctgaagcactcaaaggccgacggcctggcgggcagcagacacaggtatgccgagcaggaaaacggaatcaaccaggggagtgcccagatgctctctgagaatggcgaactgaagtttccagagaaaatgggattgcctgcagcgcccttcctcaccaaaatagaacccagcaagcccgcggcaacgaggaagaggaggtggtcggcgccagagagccgcaaactggagaagtcagaagacgaaccacctttgactcttcctaagccttctctaattcctcaggaggttaagatttgcattgaaggccggtctaatgtaggcaagtagaggcagcgtgggggaaaggaaacgtggctctcccttatcatttgtatccagattactgtactgtaggctaaaataacacagtatttacatgttatcttcttaattttaggtttctgttctaaccttgtcattagagttacagcaggtgtgtcgcaggagactggtgcatatgctttttccacgagtgtctgtcagtgagcgggcgggaggaagggcacagcaggagcggtcagggctccaggcatccccggggaagaaaggaacggggcttcacagtgcctgccttctctagcggcacagaagcagccgggggcgctgactcccgctagtgtcaggagaaaagtcccgtgggaagggtcctgcaggggtgcagggttgcacgcatgtgggggtgcacaggcgctgtggcggcgagtgagggtctctttttctctgcctccctctgcctcactctcttgctatcggcatgggccgggggggttcagagcagtgtcctcctggggttcccacgtgcaaaatcaacatcaggaacccagcttcagggcatcgcggagacgcgtcagatggcagatttggaaagttaaccatttaaaagaacatttttctctccaacatattttacaataaaagcaacttttaattgtatagatatatatttccccctatggggcctgactgcactgatatatattttttttaaagagcaactgccacatgcgggatttcatttctgctttttactagtgcagcgatgtcaccagggtgttgtggtggacagggaagcccctgctgtcatggccccacatggggtaaggggggttgggggtgggggagagggagagagcgaacacccacgctggtttctgtgcagtgttaggaaaaccaatcaggttattgcattgacttcactcccaagaggtagatgcaaactgcccttcagtgagagcaacagaagctcttcacgttgagtttgcgaaatctttttgtctttgaactctagtactgtttatagttcatgactatggacaactcgggtgccactttttttttttttcagattccagtgtgacatgaggaattagattttgaagatgagcatatattactatctttaagcatttaaaaatactgttcacactttattaccaagcatcttggtctctcattcaacaagtactgtatctcactttaaactctttggggaaaaaacaaaaacaaaaaaaactaagttgctttctttttttcaacactgtaactacatttcagctctgcagaattgctgaagagcaagatattgaaagtttcaatgtggtttaaagggatgaatgtgaattatgaactagtatgtgacaataaatgaccaccaagtactacctgacgggaggcacttttcactttgatgtctgagaatcagttcaaggcatatgcagagttggcagagaaactgagagaaaagggatggagaagagaatactcatttttgtccagtgtttttctttttaagatgaacttttaaagaaccttgcgatttgcacatattgagtttataacttgtgtgatattcctgcagtttttatccaataacattgtgggaaaggtttgggggactgaacgagcataaataaatgtagcaaaatttctttctaacctgcctaaactctaggccattttataaggttatgttcctttgaaaattcattttggtctttttaccacatctgtcacaaaaagccaggtcttagcgggctcttagaaactctgagaattttcttcagattcattgagagagttttccataaagacatttatatatgtgagcaagattttttttaaacaattactttattattgttgttattaatgttattttcagaatggcttttttttttctattcaaaatcaaatcgagatttaatgtttggtacaaacccagaaagggtatttcatagtttttaaacctttcattcccagagatccgaaatatcatttgtgggttttgaatgcatctttaaagtgctttaaaaaaaagttttataagtagggagaaatttttaaatattcttacttggatggctgcaactaaactgaacaaatacctgacttttcttttaccccattgaaaatagtactttcttcgtttcacaaattaaaaaaaaaatctggtatcaacccacattttggctgtctagtattcatttacatttagggttcaccaggactaatgatttttataaaccgttttctggggtgtaccaaaaacatttgaataggtttagaatagctagaatagttccttgactttcctcgaatttcattaccctctcagcatgcttgcagagagctgggtgggctcattcttgcagtcatactgcttatttagtgctgtattttttaaacgtttctgttcagagaacttgcttaatcttccatatattctgctcagggcacttgcaattattaggttttgtttttctttttgttttttagcctttgatggtaagaggaatacgggctgccacatagactttgttctcattaatatcactatttacaactcatgtggactcagaaaaacacacaccaccttttggcttacttcgagtattgaattgactggatccactaaaccaacactaagatgggaaaacacacatggtttggagcaataggaacatcatcataatttttgtggttctatttcaggtataggaattataaaataattggttctttctaaacacttgtcccatttcattctcttgcttttttagcatgtgcaatactttctgtgccaatagagtctgaccagtgtgctatatagttaaagctcattcccttttggctttttccttgtttggttgatcttccccattctggccagagcagggctggagggaaggagccaggagggagagagcctcccacctttcccctgctgcggatgctgagtgctggggcggggagccttcaggagccccgtgcgtctgccgccacgttgcagaaagagccagccaaggagacccgggggaggaaccgcagtgtcccctgtcaccacacggaatagtgaatgtggagtgtggagaggaaggaggcagattcatttctaagacgcactctggagccatgtagcctggagtcaacccattttccacggtcttttctgcaagtgggcaggcccctcctcggggtctgtgtccttgagacttggagccctgcctctgagcctggacgggaagtgtggcctgttgtgtgtgtgcgttctgagcgtgttggccagtggctgtggaggggaccacctgccacccacggtcaccactcccttgtggcagctttctcttcaaataggaagaacgcacagagggcaggagcctcctgtttgcagacgttggcgggccccgaggctcccagagcagcctctgtcaccgcttctgtgtagcaaacattaacgatgacaggggtagaaattcttcggtgccgttcagcttacaaggatcagccatgtgcctctgtactatgtccactttgcaatatttaccgacagccgtcttttgttctttctttcctgttttccatttttaaactagtaacagcaggccttttgcgtttacaatggaacacaatcaccaagaaattagtcagggcgaaaagaaaaaaataatactattaataagaaaccaacaaacaagaacctctctttctagggatttctaaatatataaaatgactgttccttagaatgtttaacttaagaattatttcagtttgtctgggccacactggggcagaggggggagggagggatacagagatggatgccacttacctcagatcttttaaagtggaaatccaaattgaattttcatttggactttcaggataattttctatgttggtcaacttttcgttttccctaactcacccagtttagtttgggatgatttgatttctgttgttgttgatcccatttctaacttggaattgtgagcctctatgttttctgttaggtgagtgtgttgggttttttccccccaccaggaagtggcagcatccctccttctcccctaaagggactctgcggaacctttcacacctctttctcagggacggggcaggtgtgtgtgtggtacactgacgtgtccagaagcagcactttgactgctctggagtagggttgtacaatttcaaggaatgtttggatttcctgcatcttgtggattactccttagataccgcatagattgcaatataatgctgcatgttcaagatgaacagtagctcctagtaatcataaaatccactctttgcacagtttgatctttactgaaatatgttgccaaaatttatttttgttgttgtagctctggattttgttttgttttgttttttaaggaaacgattgacaataccctttaacatctgtgactactaaggaaacctatttctttcatagagagaaaaatctccaatgcttttgaagacactaataccgtgctatttcagatatgggtgaggaagcagagctctcggtaccgaaggccgggcttcttgagctgtgttggttgtcatggctactgtttcatgaaccacaagcagctcaacagactggtctgttgccttctgaaaccctttgcacttcaatttgcaccaggtgaaaacagggccagcagactccatggcccaattcggtttcttcggtggtgatgtgaaaggagagaattacactttttttttttttaagtggcgtggaggcctttgcttccacatttgtttttaacccagaatttctgaaatagagaatttaagaacacatcaagtaataaatatacagagaatatacttttttataaagcacatgcatctgctattgtgttgggttggtttcctctcttttccacggacagtgttgtgtttctggcatagggaaactccaaacaacttgcacacctctactccggagctgagatttcttttacatagatgacctcgcttcaaatacgttaccttactgatgataggatcttttcttgtagcactataccttgtgggaatttttttttaaatgtacacctgatttgagaagctgaagaaaacaaaattttgaagcactcactttgaggagtacaggtaatgttttaaaaaattgcacaaaagaaaaatgaatgtcgaaatgattcattcagtgtttgaaagatatggctctgttgaaacaatgagtttcatactttgtttgtaaaaaaaaaaaagcagagaagggttgaaagttacatgtttttttgtatatagaaatttgtcatgtctaaatgatcagatttgtatggttatggcctggaagaattactacgtaaaaggctcttaaactatacctatgcttattgttatttttgttacatatagccctcgtctgagggaggggaactcggtattctgcgatttgagaatactgttcattcctatgctgaaagtacttctctgagctcccttcttagtctaaactcttaagccattgcaacttctttttcttcagagatgatgtttgacattttcagcacttcctgttcctataaacccaaagaatataatcttgaacacgaagtgtttgtaacaagggatccaggctaccaatcaaacaggactcattatggggacaaaaaaaaaaattatttcaccttctttccccccacacctcatttaaatggggggagtaaaaacatgatttcaatgtaaatgcctcattttattttagttttattttgatttttatttaatataaagaggccagaataaatacggagcatcttctcagaatagtattcctgtccaaaaatcaagccggacagtggaaactggacagctgtggggatattaagcacccccacttacaattcttaaattcagaatctcgtcccctcccttctcgttgaaggcaactgttctggtagctaactttctcctgtgtaatggcgggagggaacaccggcttcagtttttcatgtccccatgacttgcatacaaatggttcaactgtattaaaattaagtgcatttggccaataggtagtatctatacaataacaacaatctctaagaatttccataacttttcttatctgaaaggactcaagtcttccactgcagatacattggaggcttcacccacgttttctttccctttagtttgtttgctgtctggatggccaatgagcctgtctccttttctgtggccaatctgaaggccttcgttggaagtgttgtttacagtaatccttaccaagataacatactgtcctccagaataccaagtattaggtgacactagctcaagctgttgtcttcagagcagttaccaagaagctcggtgcacaggttttctctggttcttacaggaaccacctactctttcagttttctggcccaggagtggggtaaatcctttagttagtgcatttgaacttgatacctgtgcattcagttctgtgaatactgccctttttggcggggtttcctcatctccccagcctgaactgctcaactctaaacccaaattagtgtcagccgaaaggaggtttcaagatagtcctgtcagtatttgtggtgaccttcagattagacagtcttcatttccagccagtggagtcctggctccagagccatctctgagactcgtactactggatgttttaatatcagatcattacccaccatatgcctcccacaggccaagggaaaacagacaccagaacttgggttgagggcactaccagactgacatggccagtacagaggagaactagggaaggaatgatgttttgcaccttattgaaaagaaaattttaagtgcatacataatagttaagagcttttattgtgacaggagaacttttttccatatgcgtgcatactctctgtaattccagtgtaaaatattgtacttgcactagcttttttaaacaaatattaaaaaatggaagaattcatattctattttctaatcgtggtgtgtctatttgtaggatacactcgagtctgtttattgaattttatggtccctttctttgatggtgcttgcaggttttctaggtagaaattatttcattattataataaaacaatgtttgattcaaaatttgaacaaaattgttttaaataaattgtctgtataccagtacaagtttattgtttcagtatactcgtactaataaaataacagtgccaattgca

SEQ ID NO: 820 - DNA, 10557 bp, Homo sapiens
  source 1..10557: mol_type = genomic DNA
atttctactacagtggcggagccgtacaggacctgtttcactgcagggggatccaaaacaagccccgtggagcagcagccagagcaacagcagccgcaagacattgtttctctccctctgcccccccttccccacgcaaccccagatccatttacactttacagagcatcgtgcatcaagtcaccagggtggtccattcaagctgcagatttgtttgtcatccttgtacagcaatctcctcctccactgccactacagggaagtgcatcacatgtcagcatactggagcatagtgaaagagtctattttgaagcttcaaacttagtgctgctgcagaccaggaacaagagagaaagagtggatttcagcctgcacggatggtcttgaaacacaaatggtttttggtctaggcgttttacactgagattctccactgccaccctttctactcaagcaaaatcttcgtgaaaagatctgctgcaaggaactgatagcttatggttctccattgtgatgaaagcacatggtacagttttccaaagaaattagaccattttcttcgtgagaaagaaatcgacgtgctgttttcatagggtatttctcacttctctgtgaaaggaagaaagaacacgcctgagcccaagagccctcaggagccctccagagcctgtgggaagtctccatggtgaagtataggctgaggctacctgtgaacagtacgcagtgaatgttcatccagagctgctgttggcggattgtacccacggggagatgattcctcatgaagagcctggatcccctacagaaatcaaatgtgactttccgtttatcagactaaaatcagagccatccagacagtgaaacagtcaccgtggaggggggacggcgaaaaatgaaatccaaccaagagcggagcaacgaatgcctgcctcccaagaagcgcgagatccccgccaccagccggtcctccgaggagaaggcccctaccctgcccagcgacaaccaccgggtggagggcacagcatggctcccgggcaaccctggtggccggggccacgggggcgggaggcatgggccggcagggacctcggtggagcttggtttacaacagggaataggtttacacaaagcattgtccacagggctggactactccccgcccagcgctcccaggtctgtccccgtggccaccacgctgcctgccgcgtacgccaccccgcagccagggaccccggtgtcccccgtgcagtacgctcacctgccgcacaccttccagttcattgggtcctcccaatacagtggaacctatgccagcttcatcccatcacagctgatccccccaaccgccaaccccgtcaccagtgcagtggcctcggccgcaggggccaccactccatcccagcgctcccagctggaggcctattccactctgctggccaacatgggcagtctgagccagacgccgggacacaaggctgagcagcagcagcagcagcagcagcagcagcagcagcagcatcagcatcagcagcagcagcagcagcagcagcagcagcagcagcagcagcacctcagcagggctccggggctcatcaccccggggtcccccccaccagcccagcagaaccagtacgtccacatttccagttctccgcagaacaccggccgcaccgcctctcctccggccatccccgtccacctccacccccaccagacgatgatcccacacacgctcaccctggggcccccctcccaggtcgtcatgcaatacgccgactccggcagccactttgtccctcgggaggccaccaagaaagctgagagcagccggctgcagcaggccatccaggccaaggaggtcctgaacggtgagatggagaagagccggcggtacggggccccgtcctcagccgacctgggcctgggcaaggcaggcggcaagtcggttcctcacccgtacgagtccaggcacgtggtggtccacccgagcccctcagactacagcagtcgtgatccttcgggggtccgggcctctgtgatggtcctgcccaacagcaacacgcccgcagctgacctggaggtgcaacaggccactcatcgtgaagcctccccttctaccctcaacgacaaaagtggcctgcatttagggaagcctggccaccggtcctacgcgctctcaccccacacggtcattcagaccacacacagtgcttcagagccactcccggtgggactgccagccacggccttctacgcagggactcaaccccctgtcatcggctacctgagcggccagcagcaagcaatcacctacgccggcagcctgccccagcacctggtgatccccggcacacagcccctgctcatcccggtcggcagcactgacatggaagcgtcgggggcagccccggccatagtcacgtcatccccccagtttgctgcagtgcctcacacgttcgtcaccaccgcccttcccaagagcgagaacttcaaccctgaggccctggtcacccaggccgcctacccagccatggtgcaggcccagatccacctgcctgtggtgcagtccgtggcctccccggcggcggctccccctacgctgcctccctacttcatgaaaggctccatcatccagttggccaacggggagctaaagaaggtggaagacttaaaaacagaagatttcatccagagtgcagagataagcaacgacctgaagatcgactccagcaccgtagagaggattgaagacagccatagcccgggcgtggccgtgatacagttcgccgtcggggagcaccgagcccaggtcagcgttgaagttttggtagagtatcctttttttgtgtttggacagggctggtcatcctgctgtccggagagaaccagccagctctttgatttgccgtgttccaaactctcagttggggatgtctgcatctcgcttaccctcaagaacctgaagaacggctctgttaaaaagggccagcccgtggatcccgccagcgtcctgctgaagcactcaaaggccgacggcctggcgggcagcagacacaggtatgccgagcaggaaaacggaatcaaccaggggagtgcccagatgctctctgagaatggcgaactgaagtttccagagaaaatgggattgcctgcagcgcccttcctcaccaaaatagaacccagcaagcccgcggcaacgaggaagaggaggtggtcggcgccagagagccgcaaactggagaagtcagaagacgaaccacctttgactcttcctaagccttctctaattcctcaggaggttaagatttgcattgaaggccggtctaatgtaggcaagtagaggcagcgtgggggaaaggaaacgtggctctcccttatcatttgtatccagattactgtactgtaggctaaaataacacagtatttacatgttatcttcttaattttaggtttctgttctaaccttgtcattagagttacagcaggtgtgtcgcaggagactggtgcatatgctttttccacgagtgtctgtcagtgagcgggcgggaggaagggcacagcaggagcggtcagggctccaggcatccccggggaagaaaggaacggggcttcacagtgcctgccttctctagcggcacagaagcagccgggggcgctgactcccgctagtgtcaggagaaaagtcccgtgggaagggtcctgcaggggtgcagggttgcacgcatgtgggggtgcacaggcgctgtggcggcgagtgagggtctctttttctctgcctccctctgcctcactctcttgctatcggcatgggccgggggggttcagagcagtgtcctcctggggttcccacgtgcaaaatcaacatcaggaacccagcttcagggcatcgcggagacgcgtcagatggcagatttggaaagttaaccatttaaaagaacatttttctctccaacatattttacaataaaagcaacttttaattgtatagatatatatttccccctatggggcctgactgcactgatatatattttttttaaagagcaactgccacatgcgggatttcatttctgctttttactagtgcagcgatgtcaccagggtgttgtggtggacagggaagcccctgctgtcatggccccacatggggtaaggggggttgggggtgggggagagggagagagcgaacacccacgctggtttctgtgcagtgttaggaaaaccaatcaggttattgcattgacttcactcccaagaggtagatgcaaactgcccttcagtgagagcaacagaagctcttcacgttgagtttgcgaaatctttttgtctttgaactctagtactgtttatagttcatgactatggacaactcgggtgccactttttttttttttcagattccagtgtgacatgaggaattagattttgaagatgagcatatattactatctttaagcatttaaaaatactgttcacactttattaccaagcatcttggtctctcattcaacaagtactgtatctcactttaaactctttggggaaaaaacaaaaacaaaaaaaactaagttgctttctttttttcaacactgtaactacatttcagctctgcagaattgctgaagagcaagatattgaaagtttcaatgtggtttaaagggatgaatgtgaattatgaactagtatgtgacaataaatgaccaccaagtactacctgacgggaggcacttttcactttgatgtctgagaatcagttcaaggcatatgcagagttggcagagaaactgagagaaaagggatggagaagagaatactcatttttgtccagtgtttttctttttaagatgaacttttaaagaaccttgcgatttgcacatattgagtttataacttgtgtgatattcctgcagtttttatccaataacattgtgggaaaggtttgggggactgaacgagcataaataaatgtagcaaaatttctttctaacctgcctaaactctaggccattttataaggttatgttcctttgaaaattcattttggtctttttaccacatctgtcacaaaaagccaggtcttagcgggctcttagaaactctgagaattttcttcagattcattgagagagttttccataaagacatttatatatgtgagcaagattttttttaaacaattactttattattgttgttattaatgttattttcagaatggcttttttttttctattcaaaatcaaatcgagatttaatgtttggtacaaacccagaaagggtatttcatagtttttaaacctttcattcccagagatccgaaatatcatttgtgggttttgaatgcatctttaaagtgctttaaaaaaaagttttataagtagggagaaatttttaaatattcttacttggatggctgcaactaaactgaacaaatacctgacttttcttttaccccattgaaaatagtactttcttcgtttcacaaattaaaaaaaaaatctggtatcaacccacattttggctgtctagtattcatttacatttagggttcaccaggactaatgatttttataaaccgttttctggggtgtaccaaaaacatttgaataggtttagaatagctagaatagttccttgactttcctcgaatttcattaccctctcagcatgcttgcagagagctgggtgggctcattcttgcagtcatactgcttatttagtgctgtattttttaaacgtttctgttcagagaacttgcttaatcttccatatattctgctcagggcacttgcaattattaggttttgtttttctttttgttttttagcctttgatggtaagaggaatacgggctgccacatagactttgttctcattaatatcactatttacaactcatgtggactcagaaaaacacacaccaccttttggcttacttcgagtattgaattgactggatccactaaaccaacactaagatgggaaaacacacatggtttggagcaataggaacatcatcataatttttgtggttctatttcaggtataggaattataaaataattggttctttctaaacacttgtcccatttcattctcttgcttttttagcatgtgcaatactttctgtgccaatagagtctgaccagtgtgctatatagttaaagctcattcccttttggctttttccttgtttggttgatcttccccattctggccagagcagggctggagggaaggagccaggagggagagagcctcccacctttcccctgctgcggatgctgagtgctggggcggggagccttcaggagccccgtgcgtctgccgccacgttgcagaaagagccagccaaggagacccgggggaggaaccgcagtgtcccctgtcaccacacggaatagtgaatgtggagtgtggagaggaaggaggcagattcatttctaagacgcactctggagccatgtagcctggagtcaacccattttccacggtcttttctgcaagtgggcaggcccctcctcggggtctgtgtccttgagacttggagccctgcctctgagcctggacgggaagtgtggcctgttgtgtgtgtgcgttctgagcgtgttggccagtggctgtggaggggaccacctgccacccacggtcaccactcccttgtggcagctttctcttcaaataggaagaacgcacagagggcaggagcctcctgtttgcagacgttggcgggccccgaggctcccagagcagcctctgtcaccgcttctgtgtagcaaacattaacgatgacaggggtagaaattcttcggtgccgttcagcttacaaggatcagccatgtgcctctgtactatgtccactttgcaatatttaccgacagccgtcttttgttctttctttcctgttttccatttttaaactagtaacagcaggccttttgcgtttacaatggaacacaatcaccaagaaattagtcagggcgaaaagaaaaaaataatactattaataagaaaccaacaaacaagaacctctctttctagggatttctaaatatataaaatgactgttccttagaatgtttaacttaagaattatttcagtttgtctgggccacactggggcagaggggggagggagggatacagagatggatgccacttacctcagatcttttaaagtggaaatccaaattgaattttcatttggactttcaggataattttctatgttggtcaacttttcgttttccctaactcacccagtttagtttgggatgatttgatttctgttgttgttgatcccatttctaacttggaattgtgagcctctatgttttctgttaggtgagtgtgttgggttttttccccccaccaggaagtggcagcatccctccttctcccctaaagggactctgcggaacctttcacacctctttctcagggacggggcaggtgtgtgtgtggtacactgacgtgtccagaagcagcactttgactgctctggagtagggttgtacaatttcaaggaatgtttggatttcctgcatcttgtggattactccttagataccgcatagattgcaatataatgctgcatgttcaagatgaacagtagctcctagtaatcataaaatccactctttgcacagtttgatctttactgaaatatgttgccaaaatttatttttgttgttgtagctctggattttgttttgttttgttttttaaggaaacgattgacaataccctttaacatctgtgactactaaggaaacctatttctttcatagagagaaaaatctccaatgcttttgaagacactaataccgtgctatttcagatatgggtgaggaagcagagctctcggtaccgaaggccgggcttcttgagctgtgttggttgtcatggctactgtttcatgaaccacaagcagctcaacagactggtctgttgccttctgaaaccctttgcacttcaatttgcaccaggtgaaaacagggccagcagactccatggcccaattcggtttcttcggtggtgatgtgaaaggagagaattacactttttttttttttaagtggcgtggaggcctttgcttccacatttgtttttaacccagaatttctgaaatagagaatttaagaacacatcaagtaataaatatacagagaatatacttttttataaagcacatgcatctgctattgtgttgggttggtttcctctcttttccacggacagtgttgtgtttctggcatagggaaactccaaacaacttgcacacctctactccggagctgagatttcttttacatagatgacctcgcttcaaatacgttaccttactgatgataggatcttttcttgtagcactataccttgtgggaatttttttttaaatgtacacctgatttgagaagctgaagaaaacaaaattttgaagcactcactttgaggagtacaggtaatgttttaaaaaattgcacaaaagaaaaatgaatgtcgaaatgattcattcagtgtttgaaagatatggctctgttgaaacaatgagtttcatactttgtttgtaaaaaaaaaaaagcagagaagggttgaaagttacatgtttttttgtatatagaaatttgtcatgtctaaatgatcagatttgtatggttatggcctggaagaattactacgtaaaaggctcttaaactatacctatgcttattgttatttttgttacatatagccctcgtctgagggaggggaactcggtattctgcgatttgagaatactgttcattcctatgctgaaagtacttctctgagctcccttcttagtctaaactcttaagccattgcaacttctttttcttcagagatgatgtttgacattttcagcacttcctgttcctataaacccaaagaatataatcttgaacacgaagtgtttgtaacaagggatccaggctaccaatcaaacaggactcattatggggacaaaaaaaaaaattatttcaccttctttccccccacacctcatttaaatggggggagtaaaaacatgatttcaatgtaaatgcctcattttattttagttttattttgatttttatttaatataaagaggccagaataaatacggagcatcttctcagaatagtattcctgtccaaaaatcaagccggacagtggaaactggacagctgtggggatattaagcacccccacttacaattcttaaattcagaatctcgtcccctcccttctcgttgaaggcaactgttctggtagctaactttctcctgtgtaatggcgggagggaacaccggcttcagtttttcatgtccccatgacttgcatacaaatggttcaactgtattaaaattaagtgcatttggccaataggtagtatctatacaataacaacaatctctaagaatttccataacttttcttatctgaaaggactcaagtcttccactgcagatacattggaggcttcacccacgttttctttccctttagtttgtttgctgtctggatggccaatgagcctgtctccttttctgtggccaatctgaaggccttcgttggaagtgttgtttacagtaatccttaccaagataacatactgtcctccagaataccaagtattaggtgacactagctcaagctgttgtcttcagagcagttaccaagaagctcggtgcacaggttttctctggttcttacaggaaccacctactctttcagttttctggcccaggagtggggtaaatcctttagttagtgcatttgaacttgatacctgtgcattcagttctgtgaatactgccctttttggcggggtttcctcatctccccagcctgaactgctcaactctaaacccaaattagtgtcagccgaaaggaggtttcaagatagtcctgtcagtatttgtggtgaccttcagattagacagtcttcatttccagccagtggagtcctggctccagagccatctctgagactcgtactactggatgttttaatatcagatcattacccaccatatgcctcccacaggccaagggaaaacagacaccagaacttgggttgagggcactaccagactgacatggccagtacagaggagaactagggaaggaatgatgttttgcaccttattgaaaagaaaattttaagtgcatacataatagttaagagcttttattgtgacaggagaacttttttccatatgcgtgcatactctctgtaattccagtgtaaaatattgtacttgcactagcttttttaaacaaatattaaaaaatggaagaattcatattctattttctaatcgtggtgtgtctatttgtaggatacactcgagtctgtttattgaattttatggtccctttctttgatggtgcttgcaggttttctaggtagaaattatttcattattataataaaacaatgtttgattcaaaatttgaacaaaattgttttaaataaattgtctgtataccagtacaagtttattgtttcagtatactcgtactaataaaataacagtgccaattgca

SEQ ID NO: 821 - DNA, 6884 bp, Homo sapiens
  source 1..6884: mol_type = genomic DNA
gtgggggccgttggctccagacaaataaacatggagtccatcttccacgagaaacaagaaggctcactttgtgctcaacattgcctgaataacttattgcaaggagaatattttagccctgtggaattatcctcaattgcacatcagctggatgaggaggagaggatgagaatggcagaaggaggagttactagtgaagattatcgcacgtttttacagcagccttctggaaatatggatgacagtggttttttctctattcaggttataagcaatgccttgaaagtttggggtttagaactaatcctgttcaacagtccagagtatcagaggctcaggatcgatcctataaatgaaagatcatttatatgcaattataaggaacactggtttacagttagaaaattaggaaaacagtggtttaacttgaattctctcttgacgggtccagaattaatatcagatacatatcttgcacttttcttggctcaattacaacaggaaggttattctatatttgtcgttaagggtgatctgccagattgcgaagctgaccaactcctgcagatgattagggtccaacagatgcatcgaccaaaacttattggagaagaattagcacaactaaaagagcaaagagtccataaaacagacctggaacgagtgttagaagcaaatgatggctcaggaatgttagacgaagatgaggaggatttgcagagggctctggcactaagtcgccaagaaattgacatggaagatgaggaagcagatctccgcagggctattcagctaagtatgcaaggtagttccagaaacatatctcaagatatgacacagacatcaggtacaaatcttacttcagaagagcttcggaagagacgagaagcctactttgaaaaacagcagcaaaagcagcaacagcagcagcagcagcagcagcagggggacctatcaggacagagttcacatccatgtgaaaggccagccaccagttcaggagcacttgggagtgatctaggtgatgctatgagtgaagaagacatgcttcaggcagctgtgaccatgtctttagaaactgtcagaaatgatttgaaaacagaaggaaaaaaataatacctttaaaaaataatttagatattcatactttccaacattatcctgtgtgattacagcatagggtccactttggtaatgtgtcaaagagatgaggaaataagacttttagcggtttgcaaacaaaatgatgggaaagtggaacaatgcgtcggttgtaggactaaataatgatcttccaaatattagccaaagaggcattcagcaattaaagacatttaaaatagttttctaaatgtttctttttcttttttgagtgtgcaatatgtaacatgtctaaagttagggcatttttcttggatctttttgcagactagctaattagctctcgcctcaggctttttccatatagtttgttttctttttctgtcttgtaggtaagttggctcacatcatgtaatagtggctttcatttcttattaaccaaattaacctttcaggaaagtatctctactttcctgatgttgataatagtaatggttctagaaggatgaacagttctcccttcaactgtataccgtgtgctccagtgttttcttgtgttgttttctctgatcacaacttttctgctacctggttttcattattttcccacaattcttttgaaagatggtaatcttttctgaggtttagcgttttaagccctacgatgggatcattatttcatgactggtgcgttcctaaactctgaaatcagccttgcacaagtacttgagaataaatgagcattttttaaaatgtgtgagcatgtgctttcccagatgctttatgaatgtcttttcacttatatcaaaaccttacagctttgttgcaaccccttcttcctgcgccttattttttcctttcttctccaattgagaaaactaggagaagcatagtatgcaggcaagtctccttctgttagaagactaaacatacgtacccaccatgaatgtatgatacatgaaatttggccttcaattttaatagcagttttattttattttttctcctatgactggagctttgtgttctctttacagttgagtcatggaatgtaggtgtctgcttcacatcttttagtaggtatagcttgtcaaagatggtgatctggaacatgaaaataatttactaatgaaaatatgtttaaatttatactgtgatttgacacttgcatcatgtttagatagcttaagaacaatggaagtcacagtacttagtggatctataaataagaaagtccatagttttgataaatattctctttaattgagatgtacagagagtttcttgctgggtcaataggatagtatcattttggtgaaaaccatgtctctgaaattgatgttttagtttcagtgttccctatccctcattctccatctccttttgaagctcttttgaatgttgaattgttcataagctaaaatccaagaaatttcagctgacaacttcgaaaattataatatggtatattgccctcctggtgtgtggctgcacacattttatcagggaaagttttttgatctaggatttattgctaactaactgaaaagagaagaaaaaatatcttttatttatgattataaaatagctttttcttcgatataacagattttttaagtcattattttgtgccaatcagttttctgaagtttcccttacacaaaaggatagctttattttaaaatctaaagtttcttttaatagttaaaaatgtttcagaagaattataaaactttaaaactgcaagggatgttggagtttagtactactccctcaagatttaaaaagctaaatattttaagactgaacatttatgttaattattaccagtgtgtttgtcatattttccatggatatttgttcattacctttttccattgaaaagttacattaaacttttcatacacttgaattgatgagctacctaatataaaaatgagaaaaccaatatgcattttaaagttttaactttagagtttataaagttcatatataccctagttaaagcacttaagaaaatatggcatgtttgacttttagttcctagagagtttttgtttttgtttttgtttttttttgagacggagtcttgctatgtctcccaggctggagggcagtggcatgatctcggctcactacaacttccacctcccgggttcaagcaattctcctgcctcagcctccagagtagctgggattacaggcgcccaccaccacacccggcagatttttgtatttttggtagagacgcggtttcatcatgtttggccaggctggtctcgaactcctgacctcaggtgatccgcctgccttggcctcccaaagtgttgggattacaggcatgagccactgcgcctggccagctagagagtttttaaagcagagctgagcacacactggatgcgtttgaatgtgtttgtgtagtttgttgtgaaattgttacatttagcaggcagatccagaagcactagtgaactgtcatcttggtggggttggcttaaatttaattgactgtttagattccatttcttaattgattggccagtatgaaaagatgccagtgcaagtaaccatagtatcaaaaaagttaaaaattattcaaagctatagtttatacatcaggtactgccatttactgtaaaccacctgcaagaaagtcaggaacaactaaattcacaagaactgtcctgctaagaagtgtattaaagatttccattttgttttactaattgggaacatcttaatgtttaatatttaaactattggtatcatttttctaatgtataatttgtattactgggatcaagtatgtacagtggtgatgctagtagaagtttaagccttggaaataccactttcatattttcagatgtcatggatttaatgagtaatttatgtttttaaaattcagaatagttaatctctgatctaaaaccatcaatctatgttttttacggtaatcatgtaaatatttcagtaatataaactgtttgaaaaggctgctgcaggtaaactctatactaggatcttggccaaataatttacaattcacagaatattttatttaaggtggtgctttttttttttgtccttaaaacttgatttttcttaactttattcatgatgccaaagtaaatgaggaaaaaaactcaaaaccagttgagtatcattgcagacaaaactaccagtagtccatattgtttaatattaagttgaataaaataaattttatttcagtcagagcctaaatcacattttgattgtctgaatttttgatactatttttaaaatcatgctagtggcggctgggcgtggtagctcacgcctgtaatcccagcattttgggaggccgaagtgggtggatcacgaggtcgggagttcgagaccagcttggccaaaatggtgaaaccccatctgtactaaaaactacaaaaattagctgggcgcggtggcaggtgcctgtaatcccagctacctgggagtctgaggcaggagaattgcttgaaccctggcgacagaggatgcagtgagccaagatggtgccactgtactccagactgggcgacagagtgagactctgtctcaaaaaaaaaaaaaaaatcatgctagtgccaagagctactaaattcttaaaaccggcccattggacctgtacagataaaaaatagattcagtgcataatcaaaatatgataattttaaaatcttaagtagaaaaataaatcttgatgttttaaattcttacgaggattcaatagttaatattgatgatctcccggctgggtgcagtggctcacgcctgtaatcccagcagttctggaggctgaggtgggcgaatcacttcaggccaggagttcaagaccagtctgggcaacatggtgaaacctcgtttctactaaaaatacaaaaattagccgggcgtggttgcacacacttgtaatcccagctactcaggaggctaagaatcgcatgagcctaggaggcagaggttgcagagtgccaagggctcaccactgcattccagcctgcccaacagagtgagacactgtttctgaaaaaaaaaaatatatatatatatatatatatgtgtgtatatatatatgtatatatatatgacttcctattaaaaactttatcccagtcgggggcagtggctcacgcctgtaatcccaacactttgggaggctgaggcaggtggatcacctgaagtccggagtttgagaccagcctggccaacatggtgaaaccccatctctactaaaaatacaaaacttaagccaggtatggtggcgggcacctgtaatcccagttacttgggaggctgaggcaggagaatcgtttaaacccaggaggtggaggttgcagtgagctgagatcgtgccattgcactctagcctgggcaacaagagtaaaactccatcttaaaggtttgtttgtttttttttaatccggaaacgaagaggcgttgggccgctattttctttttctttctttctttctttctttttttttttttctgagacggagtctagctctgctgcccaggctggagtacaatgacacgatgttggctcactgcaacctccacctcctgggttcaagcgattctcctgcctcagcctcccaagtacctgggattacaggcacctgccactacacctggcgaatatttgttttttttagtagagacgggcttttaccatgttaggctggtctcaaactcctgacctcaggtgatctgcctgccttggcctcccaaagtgctgggattacaggtgcaggccaccacacccggccttgggccactgttttcaaagtgaattgtttgttgtatcgagtccttaagtatggatatatatgtgaccctaattaagaactaccagattggatcaactaatcatgtcagcaatgtaaataactttatttttcatattcaaaataaaaactttcttttatttctggcccctttataaccagcatctttttgctttaaaaaatgacctggctttgtatttttttagtcttaaacataataaaaatatttttgttctaatttgctttcatgagtgaagattattgacatcgttggtaaattctagaattttgattttgttttttaatttgaagaaaatctttgctattattattttttccaagtggtctggcattttaagaattagtgctaataacgtaacttctaaatttgtcgtaattggcatgtttaatagcatatcaaaaaacattttaagcctgtggattcatagacaaagcaatgagaaacattagtaaaatataaatggatattcctgatgcatttaggaagctctcaattgtctcttgcatagttcaaggaatgttttctgaatttttttaatgctttttttttttttgaaagaggaaaacatacatttttaaatgtgattatctaatttttacaacactgggctattaggaataactttttaaaaattactgttctgtataaatatttgaaattcaagtacagaaaatatctgaaacaaaaagcattgttgtttggccatgatacaagtgcactgtggcagtgccgcttgctcaggacccagccctgcagcccttctgtgtgtgctccctcgttaagttcatttgctgttattacacacacaggccttcctgtctggtcgttagaaaagccgggcttccaaagcactgttgaacacaggattctgttgttagtgtggatgttcaatgagttgtattttaaatatcaaagattattaaataaagataatgtttgcttttcta

SEQ ID NO: 822 - DNA, 6719 bp, Homo sapiens
  source 1..6719: mol_type = genomic DNA
gtgggggccgttggctccagacaaataaacatggagtccatcttccacgagaaacagccttctggaaatatggatgacagtggttttttctctattcaggttataagcaatgccttgaaagtttggggtttagaactaatcctgttcaacagtccagagtatcagaggctcaggatcgatcctataaatgaaagatcatttatatgcaattataaggaacactggtttacagttagaaaattaggaaaacagtggtttaacttgaattctctcttgacgggtccagaattaatatcagatacatatcttgcacttttcttggctcaattacaacaggaaggttattctatatttgtcgttaagggtgatctgccagattgcgaagctgaccaactcctgcagatgattagggtccaacagatgcatcgaccaaaacttattggagaagaattagcacaactaaaagagcaaagagtccataaaacagacctggaacgagtgttagaagcaaatgatggctcaggaatgttagacgaagatgaggaggatttgcagagggctctggcactaagtcgccaagaaattgacatggaagatgaggaagcagatctccgcagggctattcagctaagtatgcaaggtagttccagaaacatatctcaagatatgacacagacatcaggtacaaatcttacttcagaagagcttcggaagagacgagaagcctactttgaaaaacagcagcaaaagcagcaacagcagcagcagcagcagcagcagggggacctatcaggacagagttcacatccatgtgaaaggccagccaccagttcaggagcacttgggagtgatctaggtgatgctatgagtgaagaagacatgcttcaggcagctgtgaccatgtctttagaaactgtcagaaatgatttgaaaacagaaggaaaaaaataatacctttaaaaaataatttagatattcatactttccaacattatcctgtgtgattacagcatagggtccactttggtaatgtgtcaaagagatgaggaaataagacttttagcggtttgcaaacaaaatgatgggaaagtggaacaatgcgtcggttgtaggactaaataatgatcttccaaatattagccaaagaggcattcagcaattaaagacatttaaaatagttttctaaatgtttctttttcttttttgagtgtgcaatatgtaacatgtctaaagttagggcatttttcttggatctttttgcagactagctaattagctctcgcctcaggctttttccatatagtttgttttctttttctgtcttgtaggtaagttggctcacatcatgtaatagtggctttcatttcttattaaccaaattaacctttcaggaaagtatctctactttcctgatgttgataatagtaatggttctagaaggatgaacagttctcccttcaactgtataccgtgtgctccagtgttttcttgtgttgttttctctgatcacaacttttctgctacctggttttcattattttcccacaattcttttgaaagatggtaatcttttctgaggtttagcgttttaagccctacgatgggatcattatttcatgactggtgcgttcctaaactctgaaatcagccttgcacaagtacttgagaataaatgagcattttttaaaatgtgtgagcatgtgctttcccagatgctttatgaatgtcttttcacttatatcaaaaccttacagctttgttgcaaccccttcttcctgcgccttattttttcctttcttctccaattgagaaaactaggagaagcatagtatgcaggcaagtctccttctgttagaagactaaacatacgtacccaccatgaatgtatgatacatgaaatttggccttcaattttaatagcagttttattttattttttctcctatgactggagctttgtgttctctttacagttgagtcatggaatgtaggtgtctgcttcacatcttttagtaggtatagcttgtcaaagatggtgatctggaacatgaaaataatttactaatgaaaatatgtttaaatttatactgtgatttgacacttgcatcatgtttagatagcttaagaacaatggaagtcacagtacttagtggatctataaataagaaagtccatagttttgataaatattctctttaattgagatgtacagagagtttcttgctgggtcaataggatagtatcattttggtgaaaaccatgtctctgaaattgatgttttagtttcagtgttccctatccctcattctccatctccttttgaagctcttttgaatgttgaattgttcataagctaaaatccaagaaatttcagctgacaacttcgaaaattataatatggtatattgccctcctggtgtgtggctgcacacattttatcagggaaagttttttgatctaggatttattgctaactaactgaaaagagaagaaaaaatatcttttatttatgattataaaatagctttttcttcgatataacagattttttaagtcattattttgtgccaatcagttttctgaagtttcccttacacaaaaggatagctttattttaaaatctaaagtttcttttaatagttaaaaatgtttcagaagaattataaaactttaaaactgcaagggatgttggagtttagtactactccctcaagatttaaaaagctaaatattttaagactgaacatttatgttaattattaccagtgtgtttgtcatattttccatggatatttgttcattacctttttccattgaaaagttacattaaacttttcatacacttgaattgatgagctacctaatataaaaatgagaaaaccaatatgcattttaaagttttaactttagagtttataaagttcatatataccctagttaaagcacttaagaaaatatggcatgtttgacttttagttcctagagagtttttgtttttgtttttgtttttttttgagacggagtcttgctatgtctcccaggctggagggcagtggcatgatctcggctcactacaacttccacctcccgggttcaagcaattctcctgcctcagcctccagagtagctgggattacaggcgcccaccaccacacccggcagatttttgtatttttggtagagacgcggtttcatcatgtttggccaggctggtctcgaactcctgacctcaggtgatccgcctgccttggcctcccaaagtgttgggattacaggcatgagccactgcgcctggccagctagagagtttttaaagcagagctgagcacacactggatgcgtttgaatgtgtttgtgtagtttgttgtgaaattgttacatttagcaggcagatccagaagcactagtgaactgtcatcttggtggggttggcttaaatttaattgactgtttagattccatttcttaattgattggccagtatgaaaagatgccagtgcaagtaaccatagtatcaaaaaagttaaaaattattcaaagctatagtttatacatcaggtactgccatttactgtaaaccacctgcaagaaagtcaggaacaactaaattcacaagaactgtcctgctaagaagtgtattaaagatttccattttgttttactaattgggaacatcttaatgtttaatatttaaactattggtatcatttttctaatgtataatttgtattactgggatcaagtatgtacagtggtgatgctagtagaagtttaagccttggaaataccactttcatattttcagatgtcatggatttaatgagtaatttatgtttttaaaattcagaatagttaatctctgatctaaaaccatcaatctatgttttttacggtaatcatgtaaatatttcagtaatataaactgtttgaaaaggctgctgcaggtaaactctatactaggatcttggccaaataatttacaattcacagaatattttatttaaggtggtgctttttttttttgtccttaaaacttgatttttcttaactttattcatgatgccaaagtaaatgaggaaaaaaactcaaaaccagttgagtatcattgcagacaaaactaccagtagtccatattgtttaatattaagttgaataaaataaattttatttcagtcagagcctaaatcacattttgattgtctgaatttttgatactatttttaaaatcatgctagtggcggctgggcgtggtagctcacgcctgtaatcccagcattttgggaggccgaagtgggtggatcacgaggtcgggagttcgagaccagcttggccaaaatggtgaaaccccatctgtactaaaaactacaaaaattagctgggcgcggtggcaggtgcctgtaatcccagctacctgggagtctgaggcaggagaattgcttgaaccctggcgacagaggatgcagtgagccaagatggtgccactgtactccagactgggcgacagagtgagactctgtctcaaaaaaaaaaaaaaaatcatgctagtgccaagagctactaaattcttaaaaccggcccattggacctgtacagataaaaaatagattcagtgcataatcaaaatatgataattttaaaatcttaagtagaaaaataaatcttgatgttttaaattcttacgaggattcaatagttaatattgatgatctcccggctgggtgcagtggctcacgcctgtaatcccagcagttctggaggctgaggtgggcgaatcacttcaggccaggagttcaagaccagtctgggcaacatggtgaaacctcgtttctactaaaaatacaaaaattagccgggcgtggttgcacacacttgtaatcccagctactcaggaggctaagaatcgcatgagcctaggaggcagaggttgcagagtgccaagggctcaccactgcattccagcctgcccaacagagtgagacactgtttctgaaaaaaaaaaatatatatatatatatatatatgtgtgtatatatatatgtatatatatatgacttcctattaaaaactttatcccagtcgggggcagtggctcacgcctgtaatcccaacactttgggaggctgaggcaggtggatcacctgaagtccggagtttgagaccagcctggccaacatggtgaaaccccatctctactaaaaatacaaaacttaagccaggtatggtggcgggcacctgtaatcccagttacttgggaggctgaggcaggagaatcgtttaaacccaggaggtggaggttgcagtgagctgagatcgtgccattgcactctagcctgggcaacaagagtaaaactccatcttaaaggtttgtttgtttttttttaatccggaaacgaagaggcgttgggccgctattttctttttctttctttctttctttctttttttttttttctgagacggagtctagctctgctgcccaggctggagtacaatgacacgatgttggctcactgcaacctccacctcctgggttcaagcgattctcctgcctcagcctcccaagtacctgggattacaggcacctgccactacacctggcgaatatttgttttttttagtagagacgggcttttaccatgttaggctggtctcaaactcctgacctcaggtgatctgcctgccttggcctcccaaagtgctgggattacaggtgcaggccaccacacccggccttgggccactgttttcaaagtgaattgtttgttgtatcgagtccttaagtatggatatatatgtgaccctaattaagaactaccagattggatcaactaatcatgtcagcaatgtaaataactttatttttcatattcaaaataaaaactttcttttatttctggcccctttataaccagcatctttttgctttaaaaaatgacctggctttgtatttttttagtcttaaacataataaaaatatttttgttctaatttgctttcatgagtgaagattattgacatcgttggtaaattctagaattttgattttgttttttaatttgaagaaaatctttgctattattattttttccaagtggtctggcattttaagaattagtgctaataacgtaacttctaaatttgtcgtaattggcatgtttaatagcatatcaaaaaacattttaagcctgtggattcatagacaaagcaatgagaaacattagtaaaatataaatggatattcctgatgcatttaggaagctctcaattgtctcttgcatagttcaaggaatgttttctgaatttttttaatgctttttttttttttgaaagaggaaaacatacatttttaaatgtgattatctaatttttacaacactgggctattaggaataactttttaaaaattactgttctgtataaatatttgaaattcaagtacagaaaatatctgaaacaaaaagcattgttgtttggccatgatacaagtgcactgtggcagtgccgcttgctcaggacccagccctgcagcccttctgtgtgtgctccctcgttaagttcatttgctgttattacacacacaggccttcctgtctggtcgttagaaaagccgggcttccaaagcactgttgaacacaggattctgttgttagtgtggatgttcaatgagttgtattttaaatatcaaagattattaaataaagataatgtttgcttttcta

SEQ ID NO: 823 - DNA, 6839 bp, Homo sapiens
  source 1..6839: mol_type = genomic DNA
gtgggggccgttggctccagacaaataaacatggagtccatcttccacgagaaacaagaaggctcactttgtgctcaacattgcctgaataacttattgcaaggagaatattttagccctgtggaattatcctcaattgcacatcagctggatgaggaggagaggatgagaatggcagaaggaggagttactagtgaagattatcgcacgtttttacaggttataagcaatgccttgaaagtttggggtttagaactaatcctgttcaacagtccagagtatcagaggctcaggatcgatcctataaatgaaagatcatttatatgcaattataaggaacactggtttacagttagaaaattaggaaaacagtggtttaacttgaattctctcttgacgggtccagaattaatatcagatacatatcttgcacttttcttggctcaattacaacaggaaggttattctatatttgtcgttaagggtgatctgccagattgcgaagctgaccaactcctgcagatgattagggtccaacagatgcatcgaccaaaacttattggagaagaattagcacaactaaaagagcaaagagtccataaaacagacctggaacgagtgttagaagcaaatgatggctcaggaatgttagacgaagatgaggaggatttgcagagggctctggcactaagtcgccaagaaattgacatggaagatgaggaagcagatctccgcagggctattcagctaagtatgcaaggtagttccagaaacatatctcaagatatgacacagacatcaggtacaaatcttacttcagaagagcttcggaagagacgagaagcctactttgaaaaacagcagcaaaagcagcaacagcagcagcagcagcagcagcagggggacctatcaggacagagttcacatccatgtgaaaggccagccaccagttcaggagcacttgggagtgatctaggtgatgctatgagtgaagaagacatgcttcaggcagctgtgaccatgtctttagaaactgtcagaaatgatttgaaaacagaaggaaaaaaataatacctttaaaaaataatttagatattcatactttccaacattatcctgtgtgattacagcatagggtccactttggtaatgtgtcaaagagatgaggaaataagacttttagcggtttgcaaacaaaatgatgggaaagtggaacaatgcgtcggttgtaggactaaataatgatcttccaaatattagccaaagaggcattcagcaattaaagacatttaaaatagttttctaaatgtttctttttcttttttgagtgtgcaatatgtaacatgtctaaagttagggcatttttcttggatctttttgcagactagctaattagctctcgcctcaggctttttccatatagtttgttttctttttctgtcttgtaggtaagttggctcacatcatgtaatagtggctttcatttcttattaaccaaattaacctttcaggaaagtatctctactttcctgatgttgataatagtaatggttctagaaggatgaacagttctcccttcaactgtataccgtgtgctccagtgttttcttgtgttgttttctctgatcacaacttttctgctacctggttttcattattttcccacaattcttttgaaagatggtaatcttttctgaggtttagcgttttaagccctacgatgggatcattatttcatgactggtgcgttcctaaactctgaaatcagccttgcacaagtacttgagaataaatgagcattttttaaaatgtgtgagcatgtgctttcccagatgctttatgaatgtcttttcacttatatcaaaaccttacagctttgttgcaaccccttcttcctgcgccttattttttcctttcttctccaattgagaaaactaggagaagcatagtatgcaggcaagtctccttctgttagaagactaaacatacgtacccaccatgaatgtatgatacatgaaatttggccttcaattttaatagcagttttattttattttttctcctatgactggagctttgtgttctctttacagttgagtcatggaatgtaggtgtctgcttcacatcttttagtaggtatagcttgtcaaagatggtgatctggaacatgaaaataatttactaatgaaaatatgtttaaatttatactgtgatttgacacttgcatcatgtttagatagcttaagaacaatggaagtcacagtacttagtggatctataaataagaaagtccatagttttgataaatattctctttaattgagatgtacagagagtttcttgctgggtcaataggatagtatcattttggtgaaaaccatgtctctgaaattgatgttttagtttcagtgttccctatccctcattctccatctccttttgaagctcttttgaatgttgaattgttcataagctaaaatccaagaaatttcagctgacaacttcgaaaattataatatggtatattgccctcctggtgtgtggctgcacacattttatcagggaaagttttttgatctaggatttattgctaactaactgaaaagagaagaaaaaatatcttttatttatgattataaaatagctttttcttcgatataacagattttttaagtcattattttgtgccaatcagttttctgaagtttcccttacacaaaaggatagctttattttaaaatctaaagtttcttttaatagttaaaaatgtttcagaagaattataaaactttaaaactgcaagggatgttggagtttagtactactccctcaagatttaaaaagctaaatattttaagactgaacatttatgttaattattaccagtgtgtttgtcatattttccatggatatttgttcattacctttttccattgaaaagttacattaaacttttcatacacttgaattgatgagctacctaatataaaaatgagaaaaccaatatgcattttaaagttttaactttagagtttataaagttcatatataccctagttaaagcacttaagaaaatatggcatgtttgacttttagttcctagagagtttttgtttttgtttttgtttttttttgagacggagtcttgctatgtctcccaggctggagggcagtggcatgatctcggctcactacaacttccacctcccgggttcaagcaattctcctgcctcagcctccagagtagctgggattacaggcgcccaccaccacacccggcagatttttgtatttttggtagagacgcggtttcatcatgtttggccaggctggtctcgaactcctgacctcaggtgatccgcctgccttggcctcccaaagtgttgggattacaggcatgagccactgcgcctggccagctagagagtttttaaagcagagctgagcacacactggatgcgtttgaatgtgtttgtgtagtttgttgtgaaattgttacatttagcaggcagatccagaagcactagtgaactgtcatcttggtggggttggcttaaatttaattgactgtttagattccatttcttaattgattggccagtatgaaaagatgccagtgcaagtaaccatagtatcaaaaaagttaaaaattattcaaagctatagtttatacatcaggtactgccatttactgtaaaccacctgcaagaaagtcaggaacaactaaattcacaagaactgtcctgctaagaagtgtattaaagatttccattttgttttactaattgggaacatcttaatgtttaatatttaaactattggtatcatttttctaatgtataatttgtattactgggatcaagtatgtacagtggtgatgctagtagaagtttaagccttggaaataccactttcatattttcagatgtcatggatttaatgagtaatttatgtttttaaaattcagaatagttaatctctgatctaaaaccatcaatctatgttttttacggtaatcatgtaaatatttcagtaatataaactgtttgaaaaggctgctgcaggtaaactctatactaggatcttggccaaataatttacaattcacagaatattttatttaaggtggtgctttttttttttgtccttaaaacttgatttttcttaactttattcatgatgccaaagtaaatgaggaaaaaaactcaaaaccagttgagtatcattgcagacaaaactaccagtagtccatattgtttaatattaagttgaataaaataaattttatttcagtcagagcctaaatcacattttgattgtctgaatttttgatactatttttaaaatcatgctagtggcggctgggcgtggtagctcacgcctgtaatcccagcattttgggaggccgaagtgggtggatcacgaggtcgggagttcgagaccagcttggccaaaatggtgaaaccccatctgtactaaaaactacaaaaattagctgggcgcggtggcaggtgcctgtaatcccagctacctgggagtctgaggcaggagaattgcttgaaccctggcgacagaggatgcagtgagccaagatggtgccactgtactccagactgggcgacagagtgagactctgtctcaaaaaaaaaaaaaaaatcatgctagtgccaagagctactaaattcttaaaaccggcccattggacctgtacagataaaaaatagattcagtgcataatcaaaatatgataattttaaaatcttaagtagaaaaataaatcttgatgttttaaattcttacgaggattcaatagttaatattgatgatctcccggctgggtgcagtggctcacgcctgtaatcccagcagttctggaggctgaggtgggcgaatcacttcaggccaggagttcaagaccagtctgggcaacatggtgaaacctcgtttctactaaaaatacaaaaattagccgggcgtggttgcacacacttgtaatcccagctactcaggaggctaagaatcgcatgagcctaggaggcagaggttgcagagtgccaagggctcaccactgcattccagcctgcccaacagagtgagacactgtttctgaaaaaaaaaaatatatatatatatatatatatgtgtgtatatatatatgtatatatatatgacttcctattaaaaactttatcccagtcgggggcagtggctcacgcctgtaatcccaacactttgggaggctgaggcaggtggatcacctgaagtccggagtttgagaccagcctggccaacatggtgaaaccccatctctactaaaaatacaaaacttaagccaggtatggtggcgggcacctgtaatcccagttacttgggaggctgaggcaggagaatcgtttaaacccaggaggtggaggttgcagtgagctgagatcgtgccattgcactctagcctgggcaacaagagtaaaactccatcttaaaggtttgtttgtttttttttaatccggaaacgaagaggcgttgggccgctattttctttttctttctttctttctttctttttttttttttctgagacggagtctagctctgctgcccaggctggagtacaatgacacgatgttggctcactgcaacctccacctcctgggttcaagcgattctcctgcctcagcctcccaagtacctgggattacaggcacctgccactacacctggcgaatatttgttttttttagtagagacgggcttttaccatgttaggctggtctcaaactcctgacctcaggtgatctgcctgccttggcctcccaaagtgctgggattacaggtgcaggccaccacacccggccttgggccactgttttcaaagtgaattgtttgttgtatcgagtccttaagtatggatatatatgtgaccctaattaagaactaccagattggatcaactaatcatgtcagcaatgtaaataactttatttttcatattcaaaataaaaactttcttttatttctggcccctttataaccagcatctttttgctttaaaaaatgacctggctttgtatttttttagtcttaaacataataaaaatatttttgttctaatttgctttcatgagtgaagattattgacatcgttggtaaattctagaattttgattttgttttttaatttgaagaaaatctttgctattattattttttccaagtggtctggcattttaagaattagtgctaataacgtaacttctaaatttgtcgtaattggcatgtttaatagcatatcaaaaaacattttaagcctgtggattcatagacaaagcaatgagaaacattagtaaaatataaatggatattcctgatgcatttaggaagctctcaattgtctcttgcatagttcaaggaatgttttctgaatttttttaatgctttttttttttttgaaagaggaaaacatacatttttaaatgtgattatctaatttttacaacactgggctattaggaataactttttaaaaattactgttctgtataaatatttgaaattcaagtacagaaaatatctgaaacaaaaagcattgttgtttggccatgatacaagtgcactgtggcagtgccgcttgctcaggacccagccctgcagcccttctgtgtgtgctccctcgttaagttcatttgctgttattacacacacaggccttcctgtctggtcgttagaaaagccgggcttccaaagcactgttgaacacaggattctgttgttagtgtggatgttcaatgagttgtattttaaatatcaaagattattaaataaagataatgtttgcttttcta

SEQ ID NO: 824 - DNA, 6731 bp, Homo sapiens
  source 1..6731: mol_type = genomic DNA
gtgggggccgttggctccagacaaataaacatggagtccatcttccacgagaaacaagaaggctcactttgtgctcaacattgcctgaataacttattgcaaggagaatattttagccctgtggaattatcctcaattgcacatcagctggatgaggaggagaggatgagaatggcagaaggaggagttactagtgaagattatcgcacgtttttacagcagccttctggaaatatggatgacagtggttttttctctattcagtggtttaacttgaattctctcttgacgggtccagaattaatatcagatacatatcttgcacttttcttggctcaattacaacaggaaggttattctatatttgtcgttaagggtgatctgccagattgcgaagctgaccaactcctgcagatgattagggtccaacagatgcatcgaccaaaacttattggagaagaattagcacaactaaaagagcaaagagtccataaaacagacctggaacgagtgttagaagcaaatgatggctcaggaatgttagacgaagatgaggaggatttgcagagggctctggcactaagtcgccaagaaattgacatggaagatgaggaagcagatctccgcagggctattcagctaagtatgcaaggtagttccagaaacatatctcaagatatgacacagacatcaggtacaaatcttacttcagaagagcttcggaagagacgagaagcctactttgaaaaacagcagcaaaagcagcaacagcagcagcagcagcagcagcagggggacctatcaggacagagttcacatccatgtgaaaggccagccaccagttcaggagcacttgggagtgatctaggtgatgctatgagtgaagaagacatgcttcaggcagctgtgaccatgtctttagaaactgtcagaaatgatttgaaaacagaaggaaaaaaataatacctttaaaaaataatttagatattcatactttccaacattatcctgtgtgattacagcatagggtccactttggtaatgtgtcaaagagatgaggaaataagacttttagcggtttgcaaacaaaatgatgggaaagtggaacaatgcgtcggttgtaggactaaataatgatcttccaaatattagccaaagaggcattcagcaattaaagacatttaaaatagttttctaaatgtttctttttcttttttgagtgtgcaatatgtaacatgtctaaagttagggcatttttcttggatctttttgcagactagctaattagctctcgcctcaggctttttccatatagtttgttttctttttctgtcttgtaggtaagttggctcacatcatgtaatagtggctttcatttcttattaaccaaattaacctttcaggaaagtatctctactttcctgatgttgataatagtaatggttctagaaggatgaacagttctcccttcaactgtataccgtgtgctccagtgttttcttgtgttgttttctctgatcacaacttttctgctacctggttttcattattttcccacaattcttttgaaagatggtaatcttttctgaggtttagcgttttaagccctacgatgggatcattatttcatgactggtgcgttcctaaactctgaaatcagccttgcacaagtacttgagaataaatgagcattttttaaaatgtgtgagcatgtgctttcccagatgctttatgaatgtcttttcacttatatcaaaaccttacagctttgttgcaaccccttcttcctgcgccttattttttcctttcttctccaattgagaaaactaggagaagcatagtatgcaggcaagtctccttctgttagaagactaaacatacgtacccaccatgaatgtatgatacatgaaatttggccttcaattttaatagcagttttattttattttttctcctatgactggagctttgtgttctctttacagttgagtcatggaatgtaggtgtctgcttcacatcttttagtaggtatagcttgtcaaagatggtgatctggaacatgaaaataatttactaatgaaaatatgtttaaatttatactgtgatttgacacttgcatcatgtttagatagcttaagaacaatggaagtcacagtacttagtggatctataaataagaaagtccatagttttgataaatattctctttaattgagatgtacagagagtttcttgctgggtcaataggatagtatcattttggtgaaaaccatgtctctgaaattgatgttttagtttcagtgttccctatccctcattctccatctccttttgaagctcttttgaatgttgaattgttcataagctaaaatccaagaaatttcagctgacaacttcgaaaattataatatggtatattgccctcctggtgtgtggctgcacacattttatcagggaaagttttttgatctaggatttattgctaactaactgaaaagagaagaaaaaatatcttttatttatgattataaaatagctttttcttcgatataacagattttttaagtcattattttgtgccaatcagttttctgaagtttcccttacacaaaaggatagctttattttaaaatctaaagtttcttttaatagttaaaaatgtttcagaagaattataaaactttaaaactgcaagggatgttggagtttagtactactccctcaagatttaaaaagctaaatattttaagactgaacatttatgttaattattaccagtgtgtttgtcatattttccatggatatttgttcattacctttttccattgaaaagttacattaaacttttcatacacttgaattgatgagctacctaatataaaaatgagaaaaccaatatgcattttaaagttttaactttagagtttataaagttcatatataccctagttaaagcacttaagaaaatatggcatgtttgacttttagttcctagagagtttttgtttttgtttttgtttttttttgagacggagtcttgctatgtctcccaggctggagggcagtggcatgatctcggctcactacaacttccacctcccgggttcaagcaattctcctgcctcagcctccagagtagctgggattacaggcgcccaccaccacacccggcagatttttgtatttttggtagagacgcggtttcatcatgtttggccaggctggtctcgaactcctgacctcaggtgatccgcctgccttggcctcccaaagtgttgggattacaggcatgagccactgcgcctggccagctagagagtttttaaagcagagctgagcacacactggatgcgtttgaatgtgtttgtgtagtttgttgtgaaattgttacatttagcaggcagatccagaagcactagtgaactgtcatcttggtggggttggcttaaatttaattgactgtttagattccatttcttaattgattggccagtatgaaaagatgccagtgcaagtaaccatagtatcaaaaaagttaaaaattattcaaagctatagtttatacatcaggtactgccatttactgtaaaccacctgcaagaaagtcaggaacaactaaattcacaagaactgtcctgctaagaagtgtattaaagatttccattttgttttactaattgggaacatcttaatgtttaatatttaaactattggtatcatttttctaatgtataatttgtattactgggatcaagtatgtacagtggtgatgctagtagaagtttaagccttggaaataccactttcatattttcagatgtcatggatttaatgagtaatttatgtttttaaaattcagaatagttaatctctgatctaaaaccatcaatctatgttttttacggtaatcatgtaaatatttcagtaatataaactgtttgaaaaggctgctgcaggtaaactctatactaggatcttggccaaataatttacaattcacagaatattttatttaaggtggtgctttttttttttgtccttaaaacttgatttttcttaactttattcatgatgccaaagtaaatgaggaaaaaaactcaaaaccagttgagtatcattgcagacaaaactaccagtagtccatattgtttaatattaagttgaataaaataaattttatttcagtcagagcctaaatcacattttgattgtctgaatttttgatactatttttaaaatcatgctagtggcggctgggcgtggtagctcacgcctgtaatcccagcattttgggaggccgaagtgggtggatcacgaggtcgggagttcgagaccagcttggccaaaatggtgaaaccccatctgtactaaaaactacaaaaattagctgggcgcggtggcaggtgcctgtaatcccagctacctgggagtctgaggcaggagaattgcttgaaccctggcgacagaggatgcagtgagccaagatggtgccactgtactccagactgggcgacagagtgagactctgtctcaaaaaaaaaaaaaaaatcatgctagtgccaagagctactaaattcttaaaaccggcccattggacctgtacagataaaaaatagattcagtgcataatcaaaatatgataattttaaaatcttaagtagaaaaataaatcttgatgttttaaattcttacgaggattcaatagttaatattgatgatctcccggctgggtgcagtggctcacgcctgtaatcccagcagttctggaggctgaggtgggcgaatcacttcaggccaggagttcaagaccagtctgggcaacatggtgaaacctcgtttctactaaaaatacaaaaattagccgggcgtggttgcacacacttgtaatcccagctactcaggaggctaagaatcgcatgagcctaggaggcagaggttgcagagtgccaagggctcaccactgcattccagcctgcccaacagagtgagacactgtttctgaaaaaaaaaaatatatatatatatatatatatgtgtgtatatatatatgtatatatatatgacttcctattaaaaactttatcccagtcgggggcagtggctcacgcctgtaatcccaacactttgggaggctgaggcaggtggatcacctgaagtccggagtttgagaccagcctggccaacatggtgaaaccccatctctactaaaaatacaaaacttaagccaggtatggtggcgggcacctgtaatcccagttacttgggaggctgaggcaggagaatcgtttaaacccaggaggtggaggttgcagtgagctgagatcgtgccattgcactctagcctgggcaacaagagtaaaactccatcttaaaggtttgtttgtttttttttaatccggaaacgaagaggcgttgggccgctattttctttttctttctttctttctttctttttttttttttctgagacggagtctagctctgctgcccaggctggagtacaatgacacgatgttggctcactgcaacctccacctcctgggttcaagcgattctcctgcctcagcctcccaagtacctgggattacaggcacctgccactacacctggcgaatatttgttttttttagtagagacgggcttttaccatgttaggctggtctcaaactcctgacctcaggtgatctgcctgccttggcctcccaaagtgctgggattacaggtgcaggccaccacacccggccttgggccactgttttcaaagtgaattgtttgttgtatcgagtccttaagtatggatatatatgtgaccctaattaagaactaccagattggatcaactaatcatgtcagcaatgtaaataactttatttttcatattcaaaataaaaactttcttttatttctggcccctttataaccagcatctttttgctttaaaaaatgacctggctttgtatttttttagtcttaaacataataaaaatatttttgttctaatttgctttcatgagtgaagattattgacatcgttggtaaattctagaattttgattttgttttttaatttgaagaaaatctttgctattattattttttccaagtggtctggcattttaagaattagtgctaataacgtaacttctaaatttgtcgtaattggcatgtttaatagcatatcaaaaaacattttaagcctgtggattcatagacaaagcaatgagaaacattagtaaaatataaatggatattcctgatgcatttaggaagctctcaattgtctcttgcatagttcaaggaatgttttctgaatttttttaatgctttttttttttttgaaagaggaaaacatacatttttaaatgtgattatctaatttttacaacactgggctattaggaataactttttaaaaattactgttctgtataaatatttgaaattcaagtacagaaaatatctgaaacaaaaagcattgttgtttggccatgatacaagtgcactgtggcagtgccgcttgctcaggacccagccctgcagcccttctgtgtgtgctccctcgttaagttcatttgctgttattacacacacaggccttcctgtctggtcgttagaaaagccgggcttccaaagcactgttgaacacaggattctgttgttagtgtggatgttcaatgagttgtattttaaatatcaaagattattaaataaagataatgtttgcttttcta

SEQ ID NO: 825 - DNA, 6201 bp, Homo sapiens
  source 1..6201: mol_type = genomic DNA
gtgggggccgttggctccagacaaataaacatggagtccatcttccacgagaaacaagaaggctcactttgtgctcaacattgcctgaataacttattgcaaggagaatattttagccctgtggaattatcctcaattgcacatcagctggatgaggaggagaggatgagaatggcagaaggaggagttactagtgaagattatcgcacgtttttacagacagcagcaaaagcagcaacagcagcagcagcagcagcagcagggggacctatcaggacagagttcacatccatgtgaaaggccagccaccagttcaggagcacttgggagtgatctaggtgatgctatgagtgaagaagacatgcttcaggcagctgtgaccatgtctttagaaactgtcagaaatgatttgaaaacagaaggaaaaaaataatacctttaaaaaataatttagatattcatactttccaacattatcctgtgtgattacagcatagggtccactttggtaatgtgtcaaagagatgaggaaataagacttttagcggtttgcaaacaaaatgatgggaaagtggaacaatgcgtcggttgtaggactaaataatgatcttccaaatattagccaaagaggcattcagcaattaaagacatttaaaatagttttctaaatgtttctttttcttttttgagtgtgcaatatgtaacatgtctaaagttagggcatttttcttggatctttttgcagactagctaattagctctcgcctcaggctttttccatatagtttgttttctttttctgtcttgtaggtaagttggctcacatcatgtaatagtggctttcatttcttattaaccaaattaacctttcaggaaagtatctctactttcctgatgttgataatagtaatggttctagaaggatgaacagttctcccttcaactgtataccgtgtgctccagtgttttcttgtgttgttttctctgatcacaacttttctgctacctggttttcattattttcccacaattcttttgaaagatggtaatcttttctgaggtttagcgttttaagccctacgatgggatcattatttcatgactggtgcgttcctaaactctgaaatcagccttgcacaagtacttgagaataaatgagcattttttaaaatgtgtgagcatgtgctttcccagatgctttatgaatgtcttttcacttatatcaaaaccttacagctttgttgcaaccccttcttcctgcgccttattttttcctttcttctccaattgagaaaactaggagaagcatagtatgcaggcaagtctccttctgttagaagactaaacatacgtacccaccatgaatgtatgatacatgaaatttggccttcaattttaatagcagttttattttattttttctcctatgactggagctttgtgttctctttacagttgagtcatggaatgtaggtgtctgcttcacatcttttagtaggtatagcttgtcaaagatggtgatctggaacatgaaaataatttactaatgaaaatatgtttaaatttatactgtgatttgacacttgcatcatgtttagatagcttaagaacaatggaagtcacagtacttagtggatctataaataagaaagtccatagttttgataaatattctctttaattgagatgtacagagagtttcttgctgggtcaataggatagtatcattttggtgaaaaccatgtctctgaaattgatgttttagtttcagtgttccctatccctcattctccatctccttttgaagctcttttgaatgttgaattgttcataagctaaaatccaagaaatttcagctgacaacttcgaaaattataatatggtatattgccctcctggtgtgtggctgcacacattttatcagggaaagttttttgatctaggatttattgctaactaactgaaaagagaagaaaaaatatcttttatttatgattataaaatagctttttcttcgatataacagattttttaagtcattattttgtgccaatcagttttctgaagtttcccttacacaaaaggatagctttattttaaaatctaaagtttcttttaatagttaaaaatgtttcagaagaattataaaactttaaaactgcaagggatgttggagtttagtactactccctcaagatttaaaaagctaaatattttaagactgaacatttatgttaattattaccagtgtgtttgtcatattttccatggatatttgttcattacctttttccattgaaaagttacattaaacttttcatacacttgaattgatgagctacctaatataaaaatgagaaaaccaatatgcattttaaagttttaactttagagtttataaagttcatatataccctagttaaagcacttaagaaaatatggcatgtttgacttttagttcctagagagtttttgtttttgtttttgtttttttttgagacggagtcttgctatgtctcccaggctggagggcagtggcatgatctcggctcactacaacttccacctcccgggttcaagcaattctcctgcctcagcctccagagtagctgggattacaggcgcccaccaccacacccggcagatttttgtatttttggtagagacgcggtttcatcatgtttggccaggctggtctcgaactcctgacctcaggtgatccgcctgccttggcctcccaaagtgttgggattacaggcatgagccactgcgcctggccagctagagagtttttaaagcagagctgagcacacactggatgcgtttgaatgtgtttgtgtagtttgttgtgaaattgttacatttagcaggcagatccagaagcactagtgaactgtcatcttggtggggttggcttaaatttaattgactgtttagattccatttcttaattgattggccagtatgaaaagatgccagtgcaagtaaccatagtatcaaaaaagttaaaaattattcaaagctatagtttatacatcaggtactgccatttactgtaaaccacctgcaagaaagtcaggaacaactaaattcacaagaactgtcctgctaagaagtgtattaaagatttccattttgttttactaattgggaacatcttaatgtttaatatttaaactattggtatcatttttctaatgtataatttgtattactgggatcaagtatgtacagtggtgatgctagtagaagtttaagccttggaaataccactttcatattttcagatgtcatggatttaatgagtaatttatgtttttaaaattcagaatagttaatctctgatctaaaaccatcaatctatgttttttacggtaatcatgtaaatatttcagtaatataaactgtttgaaaaggctgctgcaggtaaactctatactaggatcttggccaaataatttacaattcacagaatattttatttaaggtggtgctttttttttttgtccttaaaacttgatttttcttaactttattcatgatgccaaagtaaatgaggaaaaaaactcaaaaccagttgagtatcattgcagacaaaactaccagtagtccatattgtttaatattaagttgaataaaataaattttatttcagtcagagcctaaatcacattttgattgtctgaatttttgatactatttttaaaatcatgctagtggcggctgggcgtggtagctcacgcctgtaatcccagcattttgggaggccgaagtgggtggatcacgaggtcgggagttcgagaccagcttggccaaaatggtgaaaccccatctgtactaaaaactacaaaaattagctgggcgcggtggcaggtgcctgtaatcccagctacctgggagtctgaggcaggagaattgcttgaaccctggcgacagaggatgcagtgagccaagatggtgccactgtactccagactgggcgacagagtgagactctgtctcaaaaaaaaaaaaaaaatcatgctagtgccaagagctactaaattcttaaaaccggcccattggacctgtacagataaaaaatagattcagtgcataatcaaaatatgataattttaaaatcttaagtagaaaaataaatcttgatgttttaaattcttacgaggattcaatagttaatattgatgatctcccggctgggtgcagtggctcacgcctgtaatcccagcagttctggaggctgaggtgggcgaatcacttcaggccaggagttcaagaccagtctgggcaacatggtgaaacctcgtttctactaaaaatacaaaaattagccgggcgtggttgcacacacttgtaatcccagctactcaggaggctaagaatcgcatgagcctaggaggcagaggttgcagagtgccaagggctcaccactgcattccagcctgcccaacagagtgagacactgtttctgaaaaaaaaaaatatatatatatatatatatatgtgtgtatatatatatgtatatatatatgacttcctattaaaaactttatcccagtcgggggcagtggctcacgcctgtaatcccaacactttgggaggctgaggcaggtggatcacctgaagtccggagtttgagaccagcctggccaacatggtgaaaccccatctctactaaaaatacaaaacttaagccaggtatggtggcgggcacctgtaatcccagttacttgggaggctgaggcaggagaatcgtttaaacccaggaggtggaggttgcagtgagctgagatcgtgccattgcactctagcctgggcaacaagagtaaaactccatcttaaaggtttgtttgtttttttttaatccggaaacgaagaggcgttgggccgctattttctttttctttctttctttctttctttttttttttttctgagacggagtctagctctgctgcccaggctggagtacaatgacacgatgttggctcactgcaacctccacctcctgggttcaagcgattctcctgcctcagcctcccaagtacctgggattacaggcacctgccactacacctggcgaatatttgttttttttagtagagacgggcttttaccatgttaggctggtctcaaactcctgacctcaggtgatctgcctgccttggcctcccaaagtgctgggattacaggtgcaggccaccacacccggccttgggccactgttttcaaagtgaattgtttgttgtatcgagtccttaagtatggatatatatgtgaccctaattaagaactaccagattggatcaactaatcatgtcagcaatgtaaataactttatttttcatattcaaaataaaaactttcttttatttctggcccctttataaccagcatctttttgctttaaaaaatgacctggctttgtatttttttagtcttaaacataataaaaatatttttgttctaatttgctttcatgagtgaagattattgacatcgttggtaaattctagaattttgattttgttttttaatttgaagaaaatctttgctattattattttttccaagtggtctggcattttaagaattagtgctaataacgtaacttctaaatttgtcgtaattggcatgtttaatagcatatcaaaaaacattttaagcctgtggattcatagacaaagcaatgagaaacattagtaaaatataaatggatattcctgatgcatttaggaagctctcaattgtctcttgcatagttcaaggaatgttttctgaatttttttaatgctttttttttttttgaaagaggaaaacatacatttttaaatgtgattatctaatttttacaacactgggctattaggaataactttttaaaaattactgttctgtataaatatttgaaattcaagtacagaaaatatctgaaacaaaaagcattgttgtttggccatgatacaagtgcactgtggcagtgccgcttgctcaggacccagccctgcagcccttctgtgtgtgctccctcgttaagttcatttgctgttattacacacacaggccttcctgtctggtcgttagaaaagccgggcttccaaagcactgttgaacacaggattctgttgttagtgtggatgttcaatgagttgtattttaaatatcaaagattattaaataaagataatgtttgcttttcta

SEQ ID NO: 826 - DNA, 6246 bp, Homo sapiens
  source 1..6246: mol_type = genomic DNA
gtgggggccgttggctccagacaaataaacatggagtccatcttccacgagaaacaagaaggctcactttgtgctcaacattgcctgaataacttattgcaaggagaatattttagccctgtggaattatcctcaattgcacatcagctggatgaggaggagaggatgagaatggcagaaggaggagttactagtgaagattatcgcacgtttttacagcagccttctggaaatatggatgacagtggttttttctctattcagacagcagcaaaagcagcaacagcagcagcagcagcagcagcagggggacctatcaggacagagttcacatccatgtgaaaggccagccaccagttcaggagcacttgggagtgatctaggtgatgctatgagtgaagaagacatgcttcaggcagctgtgaccatgtctttagaaactgtcagaaatgatttgaaaacagaaggaaaaaaataatacctttaaaaaataatttagatattcatactttccaacattatcctgtgtgattacagcatagggtccactttggtaatgtgtcaaagagatgaggaaataagacttttagcggtttgcaaacaaaatgatgggaaagtggaacaatgcgtcggttgtaggactaaataatgatcttccaaatattagccaaagaggcattcagcaattaaagacatttaaaatagttttctaaatgtttctttttcttttttgagtgtgcaatatgtaacatgtctaaagttagggcatttttcttggatctttttgcagactagctaattagctctcgcctcaggctttttccatatagtttgttttctttttctgtcttgtaggtaagttggctcacatcatgtaatagtggctttcatttcttattaaccaaattaacctttcaggaaagtatctctactttcctgatgttgataatagtaatggttctagaaggatgaacagttctcccttcaactgtataccgtgtgctccagtgttttcttgtgttgttttctctgatcacaacttttctgctacctggttttcattattttcccacaattcttttgaaagatggtaatcttttctgaggtttagcgttttaagccctacgatgggatcattatttcatgactggtgcgttcctaaactctgaaatcagccttgcacaagtacttgagaataaatgagcattttttaaaatgtgtgagcatgtgctttcccagatgctttatgaatgtcttttcacttatatcaaaaccttacagctttgttgcaaccccttcttcctgcgccttattttttcctttcttctccaattgagaaaactaggagaagcatagtatgcaggcaagtctccttctgttagaagactaaacatacgtacccaccatgaatgtatgatacatgaaatttggccttcaattttaatagcagttttattttattttttctcctatgactggagctttgtgttctctttacagttgagtcatggaatgtaggtgtctgcttcacatcttttagtaggtatagcttgtcaaagatggtgatctggaacatgaaaataatttactaatgaaaatatgtttaaatttatactgtgatttgacacttgcatcatgtttagatagcttaagaacaatggaagtcacagtacttagtggatctataaataagaaagtccatagttttgataaatattctctttaattgagatgtacagagagtttcttgctgggtcaataggatagtatcattttggtgaaaaccatgtctctgaaattgatgttttagtttcagtgttccctatccctcattctccatctccttttgaagctcttttgaatgttgaattgttcataagctaaaatccaagaaatttcagctgacaacttcgaaaattataatatggtatattgccctcctggtgtgtggctgcacacattttatcagggaaagttttttgatctaggatttattgctaactaactgaaaagagaagaaaaaatatcttttatttatgattataaaatagctttttcttcgatataacagattttttaagtcattattttgtgccaatcagttttctgaagtttcccttacacaaaaggatagctttattttaaaatctaaagtttcttttaatagttaaaaatgtttcagaagaattataaaactttaaaactgcaagggatgttggagtttagtactactccctcaagatttaaaaagctaaatattttaagactgaacatttatgttaattattaccagtgtgtttgtcatattttccatggatatttgttcattacctttttccattgaaaagttacattaaacttttcatacacttgaattgatgagctacctaatataaaaatgagaaaaccaatatgcattttaaagttttaactttagagtttataaagttcatatataccctagttaaagcacttaagaaaatatggcatgtttgacttttagttcctagagagtttttgtttttgtttttgtttttttttgagacggagtcttgctatgtctcccaggctggagggcagtggcatgatctcggctcactacaacttccacctcccgggttcaagcaattctcctgcctcagcctccagagtagctgggattacaggcgcccaccaccacacccggcagatttttgtatttttggtagagacgcggtttcatcatgtttggccaggctggtctcgaactcctgacctcaggtgatccgcctgccttggcctcccaaagtgttgggattacaggcatgagccactgcgcctggccagctagagagtttttaaagcagagctgagcacacactggatgcgtttgaatgtgtttgtgtagtttgttgtgaaattgttacatttagcaggcagatccagaagcactagtgaactgtcatcttggtggggttggcttaaatttaattgactgtttagattccatttcttaattgattggccagtatgaaaagatgccagtgcaagtaaccatagtatcaaaaaagttaaaaattattcaaagctatagtttatacatcaggtactgccatttactgtaaaccacctgcaagaaagtcaggaacaactaaattcacaagaactgtcctgctaagaagtgtattaaagatttccattttgttttactaattgggaacatcttaatgtttaatatttaaactattggtatcatttttctaatgtataatttgtattactgggatcaagtatgtacagtggtgatgctagtagaagtttaagccttggaaataccactttcatattttcagatgtcatggatttaatgagtaatttatgtttttaaaattcagaatagttaatctctgatctaaaaccatcaatctatgttttttacggtaatcatgtaaatatttcagtaatataaactgtttgaaaaggctgctgcaggtaaactctatactaggatcttggccaaataatttacaattcacagaatattttatttaaggtggtgctttttttttttgtccttaaaacttgatttttcttaactttattcatgatgccaaagtaaatgaggaaaaaaactcaaaaccagttgagtatcattgcagacaaaactaccagtagtccatattgtttaatattaagttgaataaaataaattttatttcagtcagagcctaaatcacattttgattgtctgaatttttgatactatttttaaaatcatgctagtggcggctgggcgtggtagctcacgcctgtaatcccagcattttgggaggccgaagtgggtggatcacgaggtcgggagttcgagaccagcttggccaaaatggtgaaaccccatctgtactaaaaactacaaaaattagctgggcgcggtggcaggtgcctgtaatcccagctacctgggagtctgaggcaggagaattgcttgaaccctggcgacagaggatgcagtgagccaagatggtgccactgtactccagactgggcgacagagtgagactctgtctcaaaaaaaaaaaaaaaatcatgctagtgccaagagctactaaattcttaaaaccggcccattggacctgtacagataaaaaatagattcagtgcataatcaaaatatgataattttaaaatcttaagtagaaaaataaatcttgatgttttaaattcttacgaggattcaatagttaatattgatgatctcccggctgggtgcagtggctcacgcctgtaatcccagcagttctggaggctgaggtgggcgaatcacttcaggccaggagttcaagaccagtctgggcaacatggtgaaacctcgtttctactaaaaatacaaaaattagccgggcgtggttgcacacacttgtaatcccagctactcaggaggctaagaatcgcatgagcctaggaggcagaggttgcagagtgccaagggctcaccactgcattccagcctgcccaacagagtgagacactgtttctgaaaaaaaaaaatatatatatatatatatatatgtgtgtatatatatatgtatatatatatgacttcctattaaaaactttatcccagtcgggggcagtggctcacgcctgtaatcccaacactttgggaggctgaggcaggtggatcacctgaagtccggagtttgagaccagcctggccaacatggtgaaaccccatctctactaaaaatacaaaacttaagccaggtatggtggcgggcacctgtaatcccagttacttgggaggctgaggcaggagaatcgtttaaacccaggaggtggaggttgcagtgagctgagatcgtgccattgcactctagcctgggcaacaagagtaaaactccatcttaaaggtttgtttgtttttttttaatccggaaacgaagaggcgttgggccgctattttctttttctttctttctttctttctttttttttttttctgagacggagtctagctctgctgcccaggctggagtacaatgacacgatgttggctcactgcaacctccacctcctgggttcaagcgattctcctgcctcagcctcccaagtacctgggattacaggcacctgccactacacctggcgaatatttgttttttttagtagagacgggcttttaccatgttaggctggtctcaaactcctgacctcaggtgatctgcctgccttggcctcccaaagtgctgggattacaggtgcaggccaccacacccggccttgggccactgttttcaaagtgaattgtttgttgtatcgagtccttaagtatggatatatatgtgaccctaattaagaactaccagattggatcaactaatcatgtcagcaatgtaaataactttatttttcatattcaaaataaaaactttcttttatttctggcccctttataaccagcatctttttgctttaaaaaatgacctggctttgtatttttttagtcttaaacataataaaaatatttttgttctaatttgctttcatgagtgaagattattgacatcgttggtaaattctagaattttgattttgttttttaatttgaagaaaatctttgctattattattttttccaagtggtctggcattttaagaattagtgctaataacgtaacttctaaatttgtcgtaattggcatgtttaatagcatatcaaaaaacattttaagcctgtggattcatagacaaagcaatgagaaacattagtaaaatataaatggatattcctgatgcatttaggaagctctcaattgtctcttgcatagttcaaggaatgttttctgaatttttttaatgctttttttttttttgaaagaggaaaacatacatttttaaatgtgattatctaatttttacaacactgggctattaggaataactttttaaaaattactgttctgtataaatatttgaaattcaagtacagaaaatatctgaaacaaaaagcattgttgtttggccatgatacaagtgcactgtggcagtgccgcttgctcaggacccagccctgcagcccttctgtgtgtgctccctcgttaagttcatttgctgttattacacacacaggccttcctgtctggtcgttagaaaagccgggcttccaaagcactgttgaacacaggattctgttgttagtgtggatgttcaatgagttgtattttaaatatcaaagattattaaataaagataatgtttgcttttcta

SEQ ID NO: 827 - DNA, 6081 bp, Homo sapiens
  source 1..6081: mol_type = genomic DNA
gtgggggccgttggctccagacaaataaacatggagtccatcttccacgagaaacagccttctggaaatatggatgacagtggttttttctctattcagacagcagcaaaagcagcaacagcagcagcagcagcagcagcagggggacctatcaggacagagttcacatccatgtgaaaggccagccaccagttcaggagcacttgggagtgatctaggtgatgctatgagtgaagaagacatgcttcaggcagctgtgaccatgtctttagaaactgtcagaaatgatttgaaaacagaaggaaaaaaataatacctttaaaaaataatttagatattcatactttccaacattatcctgtgtgattacagcatagggtccactttggtaatgtgtcaaagagatgaggaaataagacttttagcggtttgcaaacaaaatgatgggaaagtggaacaatgcgtcggttgtaggactaaataatgatcttccaaatattagccaaagaggcattcagcaattaaagacatttaaaatagttttctaaatgtttctttttcttttttgagtgtgcaatatgtaacatgtctaaagttagggcatttttcttggatctttttgcagactagctaattagctctcgcctcaggctttttccatatagtttgttttctttttctgtcttgtaggtaagttggctcacatcatgtaatagtggctttcatttcttattaaccaaattaacctttcaggaaagtatctctactttcctgatgttgataatagtaatggttctagaaggatgaacagttctcccttcaactgtataccgtgtgctccagtgttttcttgtgttgttttctctgatcacaacttttctgctacctggttttcattattttcccacaattcttttgaaagatggtaatcttttctgaggtttagcgttttaagccctacgatgggatcattatttcatgactggtgcgttcctaaactctgaaatcagccttgcacaagtacttgagaataaatgagcattttttaaaatgtgtgagcatgtgctttcccagatgctttatgaatgtcttttcacttatatcaaaaccttacagctttgttgcaaccccttcttcctgcgccttattttttcctttcttctccaattgagaaaactaggagaagcatagtatgcaggcaagtctccttctgttagaagactaaacatacgtacccaccatgaatgtatgatacatgaaatttggccttcaattttaatagcagttttattttattttttctcctatgactggagctttgtgttctctttacagttgagtcatggaatgtaggtgtctgcttcacatcttttagtaggtatagcttgtcaaagatggtgatctggaacatgaaaataatttactaatgaaaatatgtttaaatttatactgtgatttgacacttgcatcatgtttagatagcttaagaacaatggaagtcacagtacttagtggatctataaataagaaagtccatagttttgataaatattctctttaattgagatgtacagagagtttcttgctgggtcaataggatagtatcattttggtgaaaaccatgtctctgaaattgatgttttagtttcagtgttccctatccctcattctccatctccttttgaagctcttttgaatgttgaattgttcataagctaaaatccaagaaatttcagctgacaacttcgaaaattataatatggtatattgccctcctggtgtgtggctgcacacattttatcagggaaagttttttgatctaggatttattgctaactaactgaaaagagaagaaaaaatatcttttatttatgattataaaatagctttttcttcgatataacagattttttaagtcattattttgtgccaatcagttttctgaagtttcccttacacaaaaggatagctttattttaaaatctaaagtttcttttaatagttaaaaatgtttcagaagaattataaaactttaaaactgcaagggatgttggagtttagtactactccctcaagatttaaaaagctaaatattttaagactgaacatttatgttaattattaccagtgtgtttgtcatattttccatggatatttgttcattacctttttccattgaaaagttacattaaacttttcatacacttgaattgatgagctacctaatataaaaatgagaaaaccaatatgcattttaaagttttaactttagagtttataaagttcatatataccctagttaaagcacttaagaaaatatggcatgtttgacttttagttcctagagagtttttgtttttgtttttgtttttttttgagacggagtcttgctatgtctcccaggctggagggcagtggcatgatctcggctcactacaacttccacctcccgggttcaagcaattctcctgcctcagcctccagagtagctgggattacaggcgcccaccaccacacccggcagatttttgtatttttggtagagacgcggtttcatcatgtttggccaggctggtctcgaactcctgacctcaggtgatccgcctgccttggcctcccaaagtgttgggattacaggcatgagccactgcgcctggccagctagagagtttttaaagcagagctgagcacacactggatgcgtttgaatgtgtttgtgtagtttgttgtgaaattgttacatttagcaggcagatccagaagcactagtgaactgtcatcttggtggggttggcttaaatttaattgactgtttagattccatttcttaattgattggccagtatgaaaagatgccagtgcaagtaaccatagtatcaaaaaagttaaaaattattcaaagctatagtttatacatcaggtactgccatttactgtaaaccacctgcaagaaagtcaggaacaactaaattcacaagaactgtcctgctaagaagtgtattaaagatttccattttgttttactaattgggaacatcttaatgtttaatatttaaactattggtatcatttttctaatgtataatttgtattactgggatcaagtatgtacagtggtgatgctagtagaagtttaagccttggaaataccactttcatattttcagatgtcatggatttaatgagtaatttatgtttttaaaattcagaatagttaatctctgatctaaaaccatcaatctatgttttttacggtaatcatgtaaatatttcagtaatataaactgtttgaaaaggctgctgcaggtaaactctatactaggatcttggccaaataatttacaattcacagaatattttatttaaggtggtgctttttttttttgtccttaaaacttgatttttcttaactttattcatgatgccaaagtaaatgaggaaaaaaactcaaaaccagttgagtatcattgcagacaaaactaccagtagtccatattgtttaatattaagttgaataaaataaattttatttcagtcagagcctaaatcacattttgattgtctgaatttttgatactatttttaaaatcatgctagtggcggctgggcgtggtagctcacgcctgtaatcccagcattttgggaggccgaagtgggtggatcacgaggtcgggagttcgagaccagcttggccaaaatggtgaaaccccatctgtactaaaaactacaaaaattagctgggcgcggtggcaggtgcctgtaatcccagctacctgggagtctgaggcaggagaattgcttgaaccctggcgacagaggatgcagtgagccaagatggtgccactgtactccagactgggcgacagagtgagactctgtctcaaaaaaaaaaaaaaaatcatgctagtgccaagagctactaaattcttaaaaccggcccattggacctgtacagataaaaaatagattcagtgcataatcaaaatatgataattttaaaatcttaagtagaaaaataaatcttgatgttttaaattcttacgaggattcaatagttaatattgatgatctcccggctgggtgcagtggctcacgcctgtaatcccagcagttctggaggctgaggtgggcgaatcacttcaggccaggagttcaagaccagtctgggcaacatggtgaaacctcgtttctactaaaaatacaaaaattagccgggcgtggttgcacacacttgtaatcccagctactcaggaggctaagaatcgcatgagcctaggaggcagaggttgcagagtgccaagggctcaccactgcattccagcctgcccaacagagtgagacactgtttctgaaaaaaaaaaatatatatatatatatatatatgtgtgtatatatatatgtatatatatatgacttcctattaaaaactttatcccagtcgggggcagtggctcacgcctgtaatcccaacactttgggaggctgaggcaggtggatcacctgaagtccggagtttgagaccagcctggccaacatggtgaaaccccatctctactaaaaatacaaaacttaagccaggtatggtggcgggcacctgtaatcccagttacttgggaggctgaggcaggagaatcgtttaaacccaggaggtggaggttgcagtgagctgagatcgtgccattgcactctagcctgggcaacaagagtaaaactccatcttaaaggtttgtttgtttttttttaatccggaaacgaagaggcgttgggccgctattttctttttctttctttctttctttctttttttttttttctgagacggagtctagctctgctgcccaggctggagtacaatgacacgatgttggctcactgcaacctccacctcctgggttcaagcgattctcctgcctcagcctcccaagtacctgggattacaggcacctgccactacacctggcgaatatttgttttttttagtagagacgggcttttaccatgttaggctggtctcaaactcctgacctcaggtgatctgcctgccttggcctcccaaagtgctgggattacaggtgcaggccaccacacccggccttgggccactgttttcaaagtgaattgtttgttgtatcgagtccttaagtatggatatatatgtgaccctaattaagaactaccagattggatcaactaatcatgtcagcaatgtaaataactttatttttcatattcaaaataaaaactttcttttatttctggcccctttataaccagcatctttttgctttaaaaaatgacctggctttgtatttttttagtcttaaacataataaaaatatttttgttctaatttgctttcatgagtgaagattattgacatcgttggtaaattctagaattttgattttgttttttaatttgaagaaaatctttgctattattattttttccaagtggtctggcattttaagaattagtgctaataacgtaacttctaaatttgtcgtaattggcatgtttaatagcatatcaaaaaacattttaagcctgtggattcatagacaaagcaatgagaaacattagtaaaatataaatggatattcctgatgcatttaggaagctctcaattgtctcttgcatagttcaaggaatgttttctgaatttttttaatgctttttttttttttgaaagaggaaaacatacatttttaaatgtgattatctaatttttacaacactgggctattaggaataactttttaaaaattactgttctgtataaatatttgaaattcaagtacagaaaatatctgaaacaaaaagcattgttgtttggccatgatacaagtgcactgtggcagtgccgcttgctcaggacccagccctgcagcccttctgtgtgtgctccctcgttaagttcatttgctgttattacacacacaggccttcctgtctggtcgttagaaaagccgggcttccaaagcactgttgaacacaggattctgttgttagtgtggatgttcaatgagttgtattttaaatatcaaagattattaaataaagataatgtttgcttttcta

SEQ ID NO: 828 - DNA, 6399 bp, Homo sapiens
  source 1..6399: mol_type = genomic DNA
gtgggggccgttggctccagacaaataaacatggagtccatcttccacgagaaacaagaaggctcactttgtgctcaacattgcctgaataacttattgcaaggagaatattttagccctgtggaattatcctcaattgcacatcagctggatgaggaggagaggatgagaatggcagaaggaggagttactagtgaagattatcgcacgtttttacagcagccttctggaaatatggatgacagtggttttttctctattcaggttataagcaatgccttgaaagtttggggtttagaactaatcctgttcaacagtccagagtatcagaggctcaggatcgatcctataaatgaaagatcatttatatgcaattataaggaacactggtttacagttagaaaattaggaaaacagacagcagcaaaagcagcaacagcagcagcagcagcagcagcagggggacctatcaggacagagttcacatccatgtgaaaggccagccaccagttcaggagcacttgggagtgatctaggtgatgctatgagtgaagaagacatgcttcaggcagctgtgaccatgtctttagaaactgtcagaaatgatttgaaaacagaaggaaaaaaataatacctttaaaaaataatttagatattcatactttccaacattatcctgtgtgattacagcatagggtccactttggtaatgtgtcaaagagatgaggaaataagacttttagcggtttgcaaacaaaatgatgggaaagtggaacaatgcgtcggttgtaggactaaataatgatcttccaaatattagccaaagaggcattcagcaattaaagacatttaaaatagttttctaaatgtttctttttcttttttgagtgtgcaatatgtaacatgtctaaagttagggcatttttcttggatctttttgcagactagctaattagctctcgcctcaggctttttccatatagtttgttttctttttctgtcttgtaggtaagttggctcacatcatgtaatagtggctttcatttcttattaaccaaattaacctttcaggaaagtatctctactttcctgatgttgataatagtaatggttctagaaggatgaacagttctcccttcaactgtataccgtgtgctccagtgttttcttgtgttgttttctctgatcacaacttttctgctacctggttttcattattttcccacaattcttttgaaagatggtaatcttttctgaggtttagcgttttaagccctacgatgggatcattatttcatgactggtgcgttcctaaactctgaaatcagccttgcacaagtacttgagaataaatgagcattttttaaaatgtgtgagcatgtgctttcccagatgctttatgaatgtcttttcacttatatcaaaaccttacagctttgttgcaaccccttcttcctgcgccttattttttcctttcttctccaattgagaaaactaggagaagcatagtatgcaggcaagtctccttctgttagaagactaaacatacgtacccaccatgaatgtatgatacatgaaatttggccttcaattttaatagcagttttattttattttttctcctatgactggagctttgtgttctctttacagttgagtcatggaatgtaggtgtctgcttcacatcttttagtaggtatagcttgtcaaagatggtgatctggaacatgaaaataatttactaatgaaaatatgtttaaatttatactgtgatttgacacttgcatcatgtttagatagcttaagaacaatggaagtcacagtacttagtggatctataaataagaaagtccatagttttgataaatattctctttaattgagatgtacagagagtttcttgctgggtcaataggatagtatcattttggtgaaaaccatgtctctgaaattgatgttttagtttcagtgttccctatccctcattctccatctccttttgaagctcttttgaatgttgaattgttcataagctaaaatccaagaaatttcagctgacaacttcgaaaattataatatggtatattgccctcctggtgtgtggctgcacacattttatcagggaaagttttttgatctaggatttattgctaactaactgaaaagagaagaaaaaatatcttttatttatgattataaaatagctttttcttcgatataacagattttttaagtcattattttgtgccaatcagttttctgaagtttcccttacacaaaaggatagctttattttaaaatctaaagtttcttttaatagttaaaaatgtttcagaagaattataaaactttaaaactgcaagggatgttggagtttagtactactccctcaagatttaaaaagctaaatattttaagactgaacatttatgttaattattaccagtgtgtttgtcatattttccatggatatttgttcattacctttttccattgaaaagttacattaaacttttcatacacttgaattgatgagctacctaatataaaaatgagaaaaccaatatgcattttaaagttttaactttagagtttataaagttcatatataccctagttaaagcacttaagaaaatatggcatgtttgacttttagttcctagagagtttttgtttttgtttttgtttttttttgagacggagtcttgctatgtctcccaggctggagggcagtggcatgatctcggctcactacaacttccacctcccgggttcaagcaattctcctgcctcagcctccagagtagctgggattacaggcgcccaccaccacacccggcagatttttgtatttttggtagagacgcggtttcatcatgtttggccaggctggtctcgaactcctgacctcaggtgatccgcctgccttggcctcccaaagtgttgggattacaggcatgagccactgcgcctggccagctagagagtttttaaagcagagctgagcacacactggatgcgtttgaatgtgtttgtgtagtttgttgtgaaattgttacatttagcaggcagatccagaagcactagtgaactgtcatcttggtggggttggcttaaatttaattgactgtttagattccatttcttaattgattggccagtatgaaaagatgccagtgcaagtaaccatagtatcaaaaaagttaaaaattattcaaagctatagtttatacatcaggtactgccatttactgtaaaccacctgcaagaaagtcaggaacaactaaattcacaagaactgtcctgctaagaagtgtattaaagatttccattttgttttactaattgggaacatcttaatgtttaatatttaaactattggtatcatttttctaatgtataatttgtattactgggatcaagtatgtacagtggtgatgctagtagaagtttaagccttggaaataccactttcatattttcagatgtcatggatttaatgagtaatttatgtttttaaaattcagaatagttaatctctgatctaaaaccatcaatctatgttttttacggtaatcatgtaaatatttcagtaatataaactgtttgaaaaggctgctgcaggtaaactctatactaggatcttggccaaataatttacaattcacagaatattttatttaaggtggtgctttttttttttgtccttaaaacttgatttttcttaactttattcatgatgccaaagtaaatgaggaaaaaaactcaaaaccagttgagtatcattgcagacaaaactaccagtagtccatattgtttaatattaagttgaataaaataaattttatttcagtcagagcctaaatcacattttgattgtctgaatttttgatactatttttaaaatcatgctagtggcggctgggcgtggtagctcacgcctgtaatcccagcattttgggaggccgaagtgggtggatcacgaggtcgggagttcgagaccagcttggccaaaatggtgaaaccccatctgtactaaaaactacaaaaattagctgggcgcggtggcaggtgcctgtaatcccagctacctgggagtctgaggcaggagaattgcttgaaccctggcgacagaggatgcagtgagccaagatggtgccactgtactccagactgggcgacagagtgagactctgtctcaaaaaaaaaaaaaaaatcatgctagtgccaagagctactaaattcttaaaaccggcccattggacctgtacagataaaaaatagattcagtgcataatcaaaatatgataattttaaaatcttaagtagaaaaataaatcttgatgttttaaattcttacgaggattcaatagttaatattgatgatctcccggctgggtgcagtggctcacgcctgtaatcccagcagttctggaggctgaggtgggcgaatcacttcaggccaggagttcaagaccagtctgggcaacatggtgaaacctcgtttctactaaaaatacaaaaattagccgggcgtggttgcacacacttgtaatcccagctactcaggaggctaagaatcgcatgagcctaggaggcagaggttgcagagtgccaagggctcaccactgcattccagcctgcccaacagagtgagacactgtttctgaaaaaaaaaaatatatatatatatatatatatgtgtgtatatatatatgtatatatatatgacttcctattaaaaactttatcccagtcgggggcagtggctcacgcctgtaatcccaacactttgggaggctgaggcaggtggatcacctgaagtccggagtttgagaccagcctggccaacatggtgaaaccccatctctactaaaaatacaaaacttaagccaggtatggtggcgggcacctgtaatcccagttacttgggaggctgaggcaggagaatcgtttaaacccaggaggtggaggttgcagtgagctgagatcgtgccattgcactctagcctgggcaacaagagtaaaactccatcttaaaggtttgtttgtttttttttaatccggaaacgaagaggcgttgggccgctattttctttttctttctttctttctttctttttttttttttctgagacggagtctagctctgctgcccaggctggagtacaatgacacgatgttggctcactgcaacctccacctcctgggttcaagcgattctcctgcctcagcctcccaagtacctgggattacaggcacctgccactacacctggcgaatatttgttttttttagtagagacgggcttttaccatgttaggctggtctcaaactcctgacctcaggtgatctgcctgccttggcctcccaaagtgctgggattacaggtgcaggccaccacacccggccttgggccactgttttcaaagtgaattgtttgttgtatcgagtccttaagtatggatatatatgtgaccctaattaagaactaccagattggatcaactaatcatgtcagcaatgtaaataactttatttttcatattcaaaataaaaactttcttttatttctggcccctttataaccagcatctttttgctttaaaaaatgacctggctttgtatttttttagtcttaaacataataaaaatatttttgttctaatttgctttcatgagtgaagattattgacatcgttggtaaattctagaattttgattttgttttttaatttgaagaaaatctttgctattattattttttccaagtggtctggcattttaagaattagtgctaataacgtaacttctaaatttgtcgtaattggcatgtttaatagcatatcaaaaaacattttaagcctgtggattcatagacaaagcaatgagaaacattagtaaaatataaatggatattcctgatgcatttaggaagctctcaattgtctcttgcatagttcaaggaatgttttctgaatttttttaatgctttttttttttttgaaagaggaaaacatacatttttaaatgtgattatctaatttttacaacactgggctattaggaataactttttaaaaattactgttctgtataaatatttgaaattcaagtacagaaaatatctgaaacaaaaagcattgttgtttggccatgatacaagtgcactgtggcagtgccgcttgctcaggacccagccctgcagcccttctgtgtgtgctccctcgttaagttcatttgctgttattacacacacaggccttcctgtctggtcgttagaaaagccgggcttccaaagcactgttgaacacaggattctgttgttagtgtggatgttcaatgagttgtattttaaatatcaaagattattaaataaagataatgtttgcttttcta

SEQ ID NO: 829 - DNA, 6521 bp, Homo sapiens
  source 1..6521: mol_type = genomic DNA
gtgggggccgttggctccagacaaataaacatggagtccatcttccacgagaaatggtttaacttgaattctctcttgacgggtccagaattaatatcagatacatatcttgcacttttcttggctcaattacaacaggaaggttattctatatttgtcgttaagggtgatctgccagattgcgaagctgaccaactcctgcagatgattagggtccaacagatgcatcgaccaaaacttattggagaagaattagcacaactaaaagagcaaagagtccataaaacagacctggaacgagtgttagaagcaaatgatggctcaggaatgttagacgaagatgaggaggatttgcagagggctctggcactaagtcgccaagaaattgacatggaagatgaggaagcagatctccgcagggctattcagctaagtatgcaaggtagttccagaaacatatctcaagatatgacacagacatcaggtacaaatcttacttcagaagagcttcggaagagacgagaagcctactttgaaaaacagcagcaaaagcagcaacagcagcagcagcagcagcagcagggggacctatcaggacagagttcacatccatgtgaaaggccagccaccagttcaggagcacttgggagtgatctaggtgatgctatgagtgaagaagacatgcttcaggcagctgtgaccatgtctttagaaactgtcagaaatgatttgaaaacagaaggaaaaaaataatacctttaaaaaataatttagatattcatactttccaacattatcctgtgtgattacagcatagggtccactttggtaatgtgtcaaagagatgaggaaataagacttttagcggtttgcaaacaaaatgatgggaaagtggaacaatgcgtcggttgtaggactaaataatgatcttccaaatattagccaaagaggcattcagcaattaaagacatttaaaatagttttctaaatgtttctttttcttttttgagtgtgcaatatgtaacatgtctaaagttagggcatttttcttggatctttttgcagactagctaattagctctcgcctcaggctttttccatatagtttgttttctttttctgtcttgtaggtaagttggctcacatcatgtaatagtggctttcatttcttattaaccaaattaacctttcaggaaagtatctctactttcctgatgttgataatagtaatggttctagaaggatgaacagttctcccttcaactgtataccgtgtgctccagtgttttcttgtgttgttttctctgatcacaacttttctgctacctggttttcattattttcccacaattcttttgaaagatggtaatcttttctgaggtttagcgttttaagccctacgatgggatcattatttcatgactggtgcgttcctaaactctgaaatcagccttgcacaagtacttgagaataaatgagcattttttaaaatgtgtgagcatgtgctttcccagatgctttatgaatgtcttttcacttatatcaaaaccttacagctttgttgcaaccccttcttcctgcgccttattttttcctttcttctccaattgagaaaactaggagaagcatagtatgcaggcaagtctccttctgttagaagactaaacatacgtacccaccatgaatgtatgatacatgaaatttggccttcaattttaatagcagttttattttattttttctcctatgactggagctttgtgttctctttacagttgagtcatggaatgtaggtgtctgcttcacatcttttagtaggtatagcttgtcaaagatggtgatctggaacatgaaaataatttactaatgaaaatatgtttaaatttatactgtgatttgacacttgcatcatgtttagatagcttaagaacaatggaagtcacagtacttagtggatctataaataagaaagtccatagttttgataaatattctctttaattgagatgtacagagagtttcttgctgggtcaataggatagtatcattttggtgaaaaccatgtctctgaaattgatgttttagtttcagtgttccctatccctcattctccatctccttttgaagctcttttgaatgttgaattgttcataagctaaaatccaagaaatttcagctgacaacttcgaaaattataatatggtatattgccctcctggtgtgtggctgcacacattttatcagggaaagttttttgatctaggatttattgctaactaactgaaaagagaagaaaaaatatcttttatttatgattataaaatagctttttcttcgatataacagattttttaagtcattattttgtgccaatcagttttctgaagtttcccttacacaaaaggatagctttattttaaaatctaaagtttcttttaatagttaaaaatgtttcagaagaattataaaactttaaaactgcaagggatgttggagtttagtactactccctcaagatttaaaaagctaaatattttaagactgaacatttatgttaattattaccagtgtgtttgtcatattttccatggatatttgttcattacctttttccattgaaaagttacattaaacttttcatacacttgaattgatgagctacctaatataaaaatgagaaaaccaatatgcattttaaagttttaactttagagtttataaagttcatatataccctagttaaagcacttaagaaaatatggcatgtttgacttttagttcctagagagtttttgtttttgtttttgtttttttttgagacggagtcttgctatgtctcccaggctggagggcagtggcatgatctcggctcactacaacttccacctcccgggttcaagcaattctcctgcctcagcctccagagtagctgggattacaggcgcccaccaccacacccggcagatttttgtatttttggtagagacgcggtttcatcatgtttggccaggctggtctcgaactcctgacctcaggtgatccgcctgccttggcctcccaaagtgttgggattacaggcatgagccactgcgcctggccagctagagagtttttaaagcagagctgagcacacactggatgcgtttgaatgtgtttgtgtagtttgttgtgaaattgttacatttagcaggcagatccagaagcactagtgaactgtcatcttggtggggttggcttaaatttaattgactgtttagattccatttcttaattgattggccagtatgaaaagatgccagtgcaagtaaccatagtatcaaaaaagttaaaaattattcaaagctatagtttatacatcaggtactgccatttactgtaaaccacctgcaagaaagtcaggaacaactaaattcacaagaactgtcctgctaagaagtgtattaaagatttccattttgttttactaattgggaacatcttaatgtttaatatttaaactattggtatcatttttctaatgtataatttgtattactgggatcaagtatgtacagtggtgatgctagtagaagtttaagccttggaaataccactttcatattttcagatgtcatggatttaatgagtaatttatgtttttaaaattcagaatagttaatctctgatctaaaaccatcaatctatgttttttacggtaatcatgtaaatatttcagtaatataaactgtttgaaaaggctgctgcaggtaaactctatactaggatcttggccaaataatttacaattcacagaatattttatttaaggtggtgctttttttttttgtccttaaaacttgatttttcttaactttattcatgatgccaaagtaaatgaggaaaaaaactcaaaaccagttgagtatcattgcagacaaaactaccagtagtccatattgtttaatattaagttgaataaaataaattttatttcagtcagagcctaaatcacattttgattgtctgaatttttgatactatttttaaaatcatgctagtggcggctgggcgtggtagctcacgcctgtaatcccagcattttgggaggccgaagtgggtggatcacgaggtcgggagttcgagaccagcttggccaaaatggtgaaaccccatctgtactaaaaactacaaaaattagctgggcgcggtggcaggtgcctgtaatcccagctacctgggagtctgaggcaggagaattgcttgaaccctggcgacagaggatgcagtgagccaagatggtgccactgtactccagactgggcgacagagtgagactctgtctcaaaaaaaaaaaaaaaatcatgctagtgccaagagctactaaattcttaaaaccggcccattggacctgtacagataaaaaatagattcagtgcataatcaaaatatgataattttaaaatcttaagtagaaaaataaatcttgatgttttaaattcttacgaggattcaatagttaatattgatgatctcccggctgggtgcagtggctcacgcctgtaatcccagcagttctggaggctgaggtgggcgaatcacttcaggccaggagttcaagaccagtctgggcaacatggtgaaacctcgtttctactaaaaatacaaaaattagccgggcgtggttgcacacacttgtaatcccagctactcaggaggctaagaatcgcatgagcctaggaggcagaggttgcagagtgccaagggctcaccactgcattccagcctgcccaacagagtgagacactgtttctgaaaaaaaaaaatatatatatatatatatatatgtgtgtatatatatatgtatatatatatgacttcctattaaaaactttatcccagtcgggggcagtggctcacgcctgtaatcccaacactttgggaggctgaggcaggtggatcacctgaagtccggagtttgagaccagcctggccaacatggtgaaaccccatctctactaaaaatacaaaacttaagccaggtatggtggcgggcacctgtaatcccagttacttgggaggctgaggcaggagaatcgtttaaacccaggaggtggaggttgcagtgagctgagatcgtgccattgcactctagcctgggcaacaagagtaaaactccatcttaaaggtttgtttgtttttttttaatccggaaacgaagaggcgttgggccgctattttctttttctttctttctttctttctttttttttttttctgagacggagtctagctctgctgcccaggctggagtacaatgacacgatgttggctcactgcaacctccacctcctgggttcaagcgattctcctgcctcagcctcccaagtacctgggattacaggcacctgccactacacctggcgaatatttgttttttttagtagagacgggcttttaccatgttaggctggtctcaaactcctgacctcaggtgatctgcctgccttggcctcccaaagtgctgggattacaggtgcaggccaccacacccggccttgggccactgttttcaaagtgaattgtttgttgtatcgagtccttaagtatggatatatatgtgaccctaattaagaactaccagattggatcaactaatcatgtcagcaatgtaaataactttatttttcatattcaaaataaaaactttcttttatttctggcccctttataaccagcatctttttgctttaaaaaatgacctggctttgtatttttttagtcttaaacataataaaaatatttttgttctaatttgctttcatgagtgaagattattgacatcgttggtaaattctagaattttgattttgttttttaatttgaagaaaatctttgctattattattttttccaagtggtctggcattttaagaattagtgctaataacgtaacttctaaatttgtcgtaattggcatgtttaatagcatatcaaaaaacattttaagcctgtggattcatagacaaagcaatgagaaacattagtaaaatataaatggatattcctgatgcatttaggaagctctcaattgtctcttgcatagttcaaggaatgttttctgaatttttttaatgctttttttttttttgaaagaggaaaacatacatttttaaatgtgattatctaatttttacaacactgggctattaggaataactttttaaaaattactgttctgtataaatatttgaaattcaagtacagaaaatatctgaaacaaaaagcattgttgtttggccatgatacaagtgcactgtggcagtgccgcttgctcaggacccagccctgcagcccttctgtgtgtgctccctcgttaagttcatttgctgttattacacacacaggccttcctgtctggtcgttagaaaagccgggcttccaaagcactgttgaacacaggattctgttgttagtgtggatgttcaatgagttgtattttaaatatcaaagattattaaataaagataatgtttgcttttcta

SEQ ID NO: 830 - DNA, 6588 bp, Homo sapiens
  source 1..6588: mol_type = genomic DNA
gtgggggccgttggctccagacaaataaacatggagtccatcttccacgagaaaaaatgaaagatcatttatatgcaattataaggaacactggtttacagttagaaaattaggaaaacagtggtttaacttgaattctctcttgacgggtccagaattaatatcagatacatatcttgcacttttcttggctcaattacaacaggaaggttattctatatttgtcgttaagggtgatctgccagattgcgaagctgaccaactcctgcagatgattagggtccaacagatgcatcgaccaaaacttattggagaagaattagcacaactaaaagagcaaagagtccataaaacagacctggaacgagtgttagaagcaaatgatggctcaggaatgttagacgaagatgaggaggatttgcagagggctctggcactaagtcgccaagaaattgacatggaagatgaggaagcagatctccgcagggctattcagctaagtatgcaaggtagttccagaaacatatctcaagatatgacacagacatcaggtacaaatcttacttcagaagagcttcggaagagacgagaagcctactttgaaaaacagcagcaaaagcagcaacagcagcagcagcagcagcagcagggggacctatcaggacagagttcacatccatgtgaaaggccagccaccagttcaggagcacttgggagtgatctaggtgatgctatgagtgaagaagacatgcttcaggcagctgtgaccatgtctttagaaactgtcagaaatgatttgaaaacagaaggaaaaaaataatacctttaaaaaataatttagatattcatactttccaacattatcctgtgtgattacagcatagggtccactttggtaatgtgtcaaagagatgaggaaataagacttttagcggtttgcaaacaaaatgatgggaaagtggaacaatgcgtcggttgtaggactaaataatgatcttccaaatattagccaaagaggcattcagcaattaaagacatttaaaatagttttctaaatgtttctttttcttttttgagtgtgcaatatgtaacatgtctaaagttagggcatttttcttggatctttttgcagactagctaattagctctcgcctcaggctttttccatatagtttgttttctttttctgtcttgtaggtaagttggctcacatcatgtaatagtggctttcatttcttattaaccaaattaacctttcaggaaagtatctctactttcctgatgttgataatagtaatggttctagaaggatgaacagttctcccttcaactgtataccgtgtgctccagtgttttcttgtgttgttttctctgatcacaacttttctgctacctggttttcattattttcccacaattcttttgaaagatggtaatcttttctgaggtttagcgttttaagccctacgatgggatcattatttcatgactggtgcgttcctaaactctgaaatcagccttgcacaagtacttgagaataaatgagcattttttaaaatgtgtgagcatgtgctttcccagatgctttatgaatgtcttttcacttatatcaaaaccttacagctttgttgcaaccccttcttcctgcgccttattttttcctttcttctccaattgagaaaactaggagaagcatagtatgcaggcaagtctccttctgttagaagactaaacatacgtacccaccatgaatgtatgatacatgaaatttggccttcaattttaatagcagttttattttattttttctcctatgactggagctttgtgttctctttacagttgagtcatggaatgtaggtgtctgcttcacatcttttagtaggtatagcttgtcaaagatggtgatctggaacatgaaaataatttactaatgaaaatatgtttaaatttatactgtgatttgacacttgcatcatgtttagatagcttaagaacaatggaagtcacagtacttagtggatctataaataagaaagtccatagttttgataaatattctctttaattgagatgtacagagagtttcttgctgggtcaataggatagtatcattttggtgaaaaccatgtctctgaaattgatgttttagtttcagtgttccctatccctcattctccatctccttttgaagctcttttgaatgttgaattgttcataagctaaaatccaagaaatttcagctgacaacttcgaaaattataatatggtatattgccctcctggtgtgtggctgcacacattttatcagggaaagttttttgatctaggatttattgctaactaactgaaaagagaagaaaaaatatcttttatttatgattataaaatagctttttcttcgatataacagattttttaagtcattattttgtgccaatcagttttctgaagtttcccttacacaaaaggatagctttattttaaaatctaaagtttcttttaatagttaaaaatgtttcagaagaattataaaactttaaaactgcaagggatgttggagtttagtactactccctcaagatttaaaaagctaaatattttaagactgaacatttatgttaattattaccagtgtgtttgtcatattttccatggatatttgttcattacctttttccattgaaaagttacattaaacttttcatacacttgaattgatgagctacctaatataaaaatgagaaaaccaatatgcattttaaagttttaactttagagtttataaagttcatatataccctagttaaagcacttaagaaaatatggcatgtttgacttttagttcctagagagtttttgtttttgtttttgtttttttttgagacggagtcttgctatgtctcccaggctggagggcagtggcatgatctcggctcactacaacttccacctcccgggttcaagcaattctcctgcctcagcctccagagtagctgggattacaggcgcccaccaccacacccggcagatttttgtatttttggtagagacgcggtttcatcatgtttggccaggctggtctcgaactcctgacctcaggtgatccgcctgccttggcctcccaaagtgttgggattacaggcatgagccactgcgcctggccagctagagagtttttaaagcagagctgagcacacactggatgcgtttgaatgtgtttgtgtagtttgttgtgaaattgttacatttagcaggcagatccagaagcactagtgaactgtcatcttggtggggttggcttaaatttaattgactgtttagattccatttcttaattgattggccagtatgaaaagatgccagtgcaagtaaccatagtatcaaaaaagttaaaaattattcaaagctatagtttatacatcaggtactgccatttactgtaaaccacctgcaagaaagtcaggaacaactaaattcacaagaactgtcctgctaagaagtgtattaaagatttccattttgttttactaattgggaacatcttaatgtttaatatttaaactattggtatcatttttctaatgtataatttgtattactgggatcaagtatgtacagtggtgatgctagtagaagtttaagccttggaaataccactttcatattttcagatgtcatggatttaatgagtaatttatgtttttaaaattcagaatagttaatctctgatctaaaaccatcaatctatgttttttacggtaatcatgtaaatatttcagtaatataaactgtttgaaaaggctgctgcaggtaaactctatactaggatcttggccaaataatttacaattcacagaatattttatttaaggtggtgctttttttttttgtccttaaaacttgatttttcttaactttattcatgatgccaaagtaaatgaggaaaaaaactcaaaaccagttgagtatcattgcagacaaaactaccagtagtccatattgtttaatattaagttgaataaaataaattttatttcagtcagagcctaaatcacattttgattgtctgaatttttgatactatttttaaaatcatgctagtggcggctgggcgtggtagctcacgcctgtaatcccagcattttgggaggccgaagtgggtggatcacgaggtcgggagttcgagaccagcttggccaaaatggtgaaaccccatctgtactaaaaactacaaaaattagctgggcgcggtggcaggtgcctgtaatcccagctacctgggagtctgaggcaggagaattgcttgaaccctggcgacagaggatgcagtgagccaagatggtgccactgtactccagactgggcgacagagtgagactctgtctcaaaaaaaaaaaaaaaatcatgctagtgccaagagctactaaattcttaaaaccggcccattggacctgtacagataaaaaatagattcagtgcataatcaaaatatgataattttaaaatcttaagtagaaaaataaatcttgatgttttaaattcttacgaggattcaatagttaatattgatgatctcccggctgggtgcagtggctcacgcctgtaatcccagcagttctggaggctgaggtgggcgaatcacttcaggccaggagttcaagaccagtctgggcaacatggtgaaacctcgtttctactaaaaatacaaaaattagccgggcgtggttgcacacacttgtaatcccagctactcaggaggctaagaatcgcatgagcctaggaggcagaggttgcagagtgccaagggctcaccactgcattccagcctgcccaacagagtgagacactgtttctgaaaaaaaaaaatatatatatatatatatatatgtgtgtatatatatatgtatatatatatgacttcctattaaaaactttatcccagtcgggggcagtggctcacgcctgtaatcccaacactttgggaggctgaggcaggtggatcacctgaagtccggagtttgagaccagcctggccaacatggtgaaaccccatctctactaaaaatacaaaacttaagccaggtatggtggcgggcacctgtaatcccagttacttgggaggctgaggcaggagaatcgtttaaacccaggaggtggaggttgcagtgagctgagatcgtgccattgcactctagcctgggcaacaagagtaaaactccatcttaaaggtttgtttgtttttttttaatccggaaacgaagaggcgttgggccgctattttctttttctttctttctttctttctttttttttttttctgagacggagtctagctctgctgcccaggctggagtacaatgacacgatgttggctcactgcaacctccacctcctgggttcaagcgattctcctgcctcagcctcccaagtacctgggattacaggcacctgccactacacctggcgaatatttgttttttttagtagagacgggcttttaccatgttaggctggtctcaaactcctgacctcaggtgatctgcctgccttggcctcccaaagtgctgggattacaggtgcaggccaccacacccggccttgggccactgttttcaaagtgaattgtttgttgtatcgagtccttaagtatggatatatatgtgaccctaattaagaactaccagattggatcaactaatcatgtcagcaatgtaaataactttatttttcatattcaaaataaaaactttcttttatttctggcccctttataaccagcatctttttgctttaaaaaatgacctggctttgtatttttttagtcttaaacataataaaaatatttttgttctaatttgctttcatgagtgaagattattgacatcgttggtaaattctagaattttgattttgttttttaatttgaagaaaatctttgctattattattttttccaagtggtctggcattttaagaattagtgctaataacgtaacttctaaatttgtcgtaattggcatgtttaatagcatatcaaaaaacattttaagcctgtggattcatagacaaagcaatgagaaacattagtaaaatataaatggatattcctgatgcatttaggaagctctcaattgtctcttgcatagttcaaggaatgttttctgaatttttttaatgctttttttttttttgaaagaggaaaacatacatttttaaatgtgattatctaatttttacaacactgggctattaggaataactttttaaaaattactgttctgtataaatatttgaaattcaagtacagaaaatatctgaaacaaaaagcattgttgtttggccatgatacaagtgcactgtggcagtgccgcttgctcaggacccagccctgcagcccttctgtgtgtgctccctcgttaagttcatttgctgttattacacacacaggccttcctgtctggtcgttagaaaagccgggcttccaaagcactgttgaacacaggattctgttgttagtgtggatgttcaatgagttgtattttaaatatcaaagattattaaataaagataatgtttgcttttcta

SEQ ID NO: 831 - DNA, 6674 bp, Homo sapiens
  source 1..6674: mol_type = genomic DNA
gtgggggccgttggctccagacaaataaacatggagtccatcttccacgagaaagttataagcaatgccttgaaagtttggggtttagaactaatcctgttcaacagtccagagtatcagaggctcaggatcgatcctataaatgaaagatcatttatatgcaattataaggaacactggtttacagttagaaaattaggaaaacagtggtttaacttgaattctctcttgacgggtccagaattaatatcagatacatatcttgcacttttcttggctcaattacaacaggaaggttattctatatttgtcgttaagggtgatctgccagattgcgaagctgaccaactcctgcagatgattagggtccaacagatgcatcgaccaaaacttattggagaagaattagcacaactaaaagagcaaagagtccataaaacagacctggaacgagtgttagaagcaaatgatggctcaggaatgttagacgaagatgaggaggatttgcagagggctctggcactaagtcgccaagaaattgacatggaagatgaggaagcagatctccgcagggctattcagctaagtatgcaaggtagttccagaaacatatctcaagatatgacacagacatcaggtacaaatcttacttcagaagagcttcggaagagacgagaagcctactttgaaaaacagcagcaaaagcagcaacagcagcagcagcagcagcagcagggggacctatcaggacagagttcacatccatgtgaaaggccagccaccagttcaggagcacttgggagtgatctaggtgatgctatgagtgaagaagacatgcttcaggcagctgtgaccatgtctttagaaactgtcagaaatgatttgaaaacagaaggaaaaaaataatacctttaaaaaataatttagatattcatactttccaacattatcctgtgtgattacagcatagggtccactttggtaatgtgtcaaagagatgaggaaataagacttttagcggtttgcaaacaaaatgatgggaaagtggaacaatgcgtcggttgtaggactaaataatgatcttccaaatattagccaaagaggcattcagcaattaaagacatttaaaatagttttctaaatgtttctttttcttttttgagtgtgcaatatgtaacatgtctaaagttagggcatttttcttggatctttttgcagactagctaattagctctcgcctcaggctttttccatatagtttgttttctttttctgtcttgtaggtaagttggctcacatcatgtaatagtggctttcatttcttattaaccaaattaacctttcaggaaagtatctctactttcctgatgttgataatagtaatggttctagaaggatgaacagttctcccttcaactgtataccgtgtgctccagtgttttcttgtgttgttttctctgatcacaacttttctgctacctggttttcattattttcccacaattcttttgaaagatggtaatcttttctgaggtttagcgttttaagccctacgatgggatcattatttcatgactggtgcgttcctaaactctgaaatcagccttgcacaagtacttgagaataaatgagcattttttaaaatgtgtgagcatgtgctttcccagatgctttatgaatgtcttttcacttatatcaaaaccttacagctttgttgcaaccccttcttcctgcgccttattttttcctttcttctccaattgagaaaactaggagaagcatagtatgcaggcaagtctccttctgttagaagactaaacatacgtacccaccatgaatgtatgatacatgaaatttggccttcaattttaatagcagttttattttattttttctcctatgactggagctttgtgttctctttacagttgagtcatggaatgtaggtgtctgcttcacatcttttagtaggtatagcttgtcaaagatggtgatctggaacatgaaaataatttactaatgaaaatatgtttaaatttatactgtgatttgacacttgcatcatgtttagatagcttaagaacaatggaagtcacagtacttagtggatctataaataagaaagtccatagttttgataaatattctctttaattgagatgtacagagagtttcttgctgggtcaataggatagtatcattttggtgaaaaccatgtctctgaaattgatgttttagtttcagtgttccctatccctcattctccatctccttttgaagctcttttgaatgttgaattgttcataagctaaaatccaagaaatttcagctgacaacttcgaaaattataatatggtatattgccctcctggtgtgtggctgcacacattttatcagggaaagttttttgatctaggatttattgctaactaactgaaaagagaagaaaaaatatcttttatttatgattataaaatagctttttcttcgatataacagattttttaagtcattattttgtgccaatcagttttctgaagtttcccttacacaaaaggatagctttattttaaaatctaaagtttcttttaatagttaaaaatgtttcagaagaattataaaactttaaaactgcaagggatgttggagtttagtactactccctcaagatttaaaaagctaaatattttaagactgaacatttatgttaattattaccagtgtgtttgtcatattttccatggatatttgttcattacctttttccattgaaaagttacattaaacttttcatacacttgaattgatgagctacctaatataaaaatgagaaaaccaatatgcattttaaagttttaactttagagtttataaagttcatatataccctagttaaagcacttaagaaaatatggcatgtttgacttttagttcctagagagtttttgtttttgtttttgtttttttttgagacggagtcttgctatgtctcccaggctggagggcagtggcatgatctcggctcactacaacttccacctcccgggttcaagcaattctcctgcctcagcctccagagtagctgggattacaggcgcccaccaccacacccggcagatttttgtatttttggtagagacgcggtttcatcatgtttggccaggctggtctcgaactcctgacctcaggtgatccgcctgccttggcctcccaaagtgttgggattacaggcatgagccactgcgcctggccagctagagagtttttaaagcagagctgagcacacactggatgcgtttgaatgtgtttgtgtagtttgttgtgaaattgttacatttagcaggcagatccagaagcactagtgaactgtcatcttggtggggttggcttaaatttaattgactgtttagattccatttcttaattgattggccagtatgaaaagatgccagtgcaagtaaccatagtatcaaaaaagttaaaaattattcaaagctatagtttatacatcaggtactgccatttactgtaaaccacctgcaagaaagtcaggaacaactaaattcacaagaactgtcctgctaagaagtgtattaaagatttccattttgttttactaattgggaacatcttaatgtttaatatttaaactattggtatcatttttctaatgtataatttgtattactgggatcaagtatgtacagtggtgatgctagtagaagtttaagccttggaaataccactttcatattttcagatgtcatggatttaatgagtaatttatgtttttaaaattcagaatagttaatctctgatctaaaaccatcaatctatgttttttacggtaatcatgtaaatatttcagtaatataaactgtttgaaaaggctgctgcaggtaaactctatactaggatcttggccaaataatttacaattcacagaatattttatttaaggtggtgctttttttttttgtccttaaaacttgatttttcttaactttattcatgatgccaaagtaaatgaggaaaaaaactcaaaaccagttgagtatcattgcagacaaaactaccagtagtccatattgtttaatattaagttgaataaaataaattttatttcagtcagagcctaaatcacattttgattgtctgaatttttgatactatttttaaaatcatgctagtggcggctgggcgtggtagctcacgcctgtaatcccagcattttgggaggccgaagtgggtggatcacgaggtcgggagttcgagaccagcttggccaaaatggtgaaaccccatctgtactaaaaactacaaaaattagctgggcgcggtggcaggtgcctgtaatcccagctacctgggagtctgaggcaggagaattgcttgaaccctggcgacagaggatgcagtgagccaagatggtgccactgtactccagactgggcgacagagtgagactctgtctcaaaaaaaaaaaaaaaatcatgctagtgccaagagctactaaattcttaaaaccggcccattggacctgtacagataaaaaatagattcagtgcataatcaaaatatgataattttaaaatcttaagtagaaaaataaatcttgatgttttaaattcttacgaggattcaatagttaatattgatgatctcccggctgggtgcagtggctcacgcctgtaatcccagcagttctggaggctgaggtgggcgaatcacttcaggccaggagttcaagaccagtctgggcaacatggtgaaacctcgtttctactaaaaatacaaaaattagccgggcgtggttgcacacacttgtaatcccagctactcaggaggctaagaatcgcatgagcctaggaggcagaggttgcagagtgccaagggctcaccactgcattccagcctgcccaacagagtgagacactgtttctgaaaaaaaaaaatatatatatatatatatatatgtgtgtatatatatatgtatatatatatgacttcctattaaaaactttatcccagtcgggggcagtggctcacgcctgtaatcccaacactttgggaggctgaggcaggtggatcacctgaagtccggagtttgagaccagcctggccaacatggtgaaaccccatctctactaaaaatacaaaacttaagccaggtatggtggcgggcacctgtaatcccagttacttgggaggctgaggcaggagaatcgtttaaacccaggaggtggaggttgcagtgagctgagatcgtgccattgcactctagcctgggcaacaagagtaaaactccatcttaaaggtttgtttgtttttttttaatccggaaacgaagaggcgttgggccgctattttctttttctttctttctttctttctttttttttttttctgagacggagtctagctctgctgcccaggctggagtacaatgacacgatgttggctcactgcaacctccacctcctgggttcaagcgattctcctgcctcagcctcccaagtacctgggattacaggcacctgccactacacctggcgaatatttgttttttttagtagagacgggcttttaccatgttaggctggtctcaaactcctgacctcaggtgatctgcctgccttggcctcccaaagtgctgggattacaggtgcaggccaccacacccggccttgggccactgttttcaaagtgaattgtttgttgtatcgagtccttaagtatggatatatatgtgaccctaattaagaactaccagattggatcaactaatcatgtcagcaatgtaaataactttatttttcatattcaaaataaaaactttcttttatttctggcccctttataaccagcatctttttgctttaaaaaatgacctggctttgtatttttttagtcttaaacataataaaaatatttttgttctaatttgctttcatgagtgaagattattgacatcgttggtaaattctagaattttgattttgttttttaatttgaagaaaatctttgctattattattttttccaagtggtctggcattttaagaattagtgctaataacgtaacttctaaatttgtcgtaattggcatgtttaatagcatatcaaaaaacattttaagcctgtggattcatagacaaagcaatgagaaacattagtaaaatataaatggatattcctgatgcatttaggaagctctcaattgtctcttgcatagttcaaggaatgttttctgaatttttttaatgctttttttttttttgaaagaggaaaacatacatttttaaatgtgattatctaatttttacaacactgggctattaggaataactttttaaaaattactgttctgtataaatatttgaaattcaagtacagaaaatatctgaaacaaaaagcattgttgtttggccatgatacaagtgcactgtggcagtgccgcttgctcaggacccagccctgcagcccttctgtgtgtgctccctcgttaagttcatttgctgttattacacacacaggccttcctgtctggtcgttagaaaagccgggcttccaaagcactgttgaacacaggattctgttgttagtgtggatgttcaatgagttgtattttaaatatcaaagattattaaataaagataatgtttgcttttcta

SEQ ID NO: 832 - DNA, 6036 bp, Homo sapiens
  source 1..6036: mol_type = genomic DNA
gtgggggccgttggctccagacaaataaacatggagtccatcttccacgagaaaacagcagcaaaagcagcaacagcagcagcagcagcagcagcagggggacctatcaggacagagttcacatccatgtgaaaggccagccaccagttcaggagcacttgggagtgatctaggtgatgctatgagtgaagaagacatgcttcaggcagctgtgaccatgtctttagaaactgtcagaaatgatttgaaaacagaaggaaaaaaataatacctttaaaaaataatttagatattcatactttccaacattatcctgtgtgattacagcatagggtccactttggtaatgtgtcaaagagatgaggaaataagacttttagcggtttgcaaacaaaatgatgggaaagtggaacaatgcgtcggttgtaggactaaataatgatcttccaaatattagccaaagaggcattcagcaattaaagacatttaaaatagttttctaaatgtttctttttcttttttgagtgtgcaatatgtaacatgtctaaagttagggcatttttcttggatctttttgcagactagctaattagctctcgcctcaggctttttccatatagtttgttttctttttctgtcttgtaggtaagttggctcacatcatgtaatagtggctttcatttcttattaaccaaattaacctttcaggaaagtatctctactttcctgatgttgataatagtaatggttctagaaggatgaacagttctcccttcaactgtataccgtgtgctccagtgttttcttgtgttgttttctctgatcacaacttttctgctacctggttttcattattttcccacaattcttttgaaagatggtaatcttttctgaggtttagcgttttaagccctacgatgggatcattatttcatgactggtgcgttcctaaactctgaaatcagccttgcacaagtacttgagaataaatgagcattttttaaaatgtgtgagcatgtgctttcccagatgctttatgaatgtcttttcacttatatcaaaaccttacagctttgttgcaaccccttcttcctgcgccttattttttcctttcttctccaattgagaaaactaggagaagcatagtatgcaggcaagtctccttctgttagaagactaaacatacgtacccaccatgaatgtatgatacatgaaatttggccttcaattttaatagcagttttattttattttttctcctatgactggagctttgtgttctctttacagttgagtcatggaatgtaggtgtctgcttcacatcttttagtaggtatagcttgtcaaagatggtgatctggaacatgaaaataatttactaatgaaaatatgtttaaatttatactgtgatttgacacttgcatcatgtttagatagcttaagaacaatggaagtcacagtacttagtggatctataaataagaaagtccatagttttgataaatattctctttaattgagatgtacagagagtttcttgctgggtcaataggatagtatcattttggtgaaaaccatgtctctgaaattgatgttttagtttcagtgttccctatccctcattctccatctccttttgaagctcttttgaatgttgaattgttcataagctaaaatccaagaaatttcagctgacaacttcgaaaattataatatggtatattgccctcctggtgtgtggctgcacacattttatcagggaaagttttttgatctaggatttattgctaactaactgaaaagagaagaaaaaatatcttttatttatgattataaaatagctttttcttcgatataacagattttttaagtcattattttgtgccaatcagttttctgaagtttcccttacacaaaaggatagctttattttaaaatctaaagtttcttttaatagttaaaaatgtttcagaagaattataaaactttaaaactgcaagggatgttggagtttagtactactccctcaagatttaaaaagctaaatattttaagactgaacatttatgttaattattaccagtgtgtttgtcatattttccatggatatttgttcattacctttttccattgaaaagttacattaaacttttcatacacttgaattgatgagctacctaatataaaaatgagaaaaccaatatgcattttaaagttttaactttagagtttataaagttcatatataccctagttaaagcacttaagaaaatatggcatgtttgacttttagttcctagagagtttttgtttttgtttttgtttttttttgagacggagtcttgctatgtctcccaggctggagggcagtggcatgatctcggctcactacaacttccacctcccgggttcaagcaattctcctgcctcagcctccagagtagctgggattacaggcgcccaccaccacacccggcagatttttgtatttttggtagagacgcggtttcatcatgtttggccaggctggtctcgaactcctgacctcaggtgatccgcctgccttggcctcccaaagtgttgggattacaggcatgagccactgcgcctggccagctagagagtttttaaagcagagctgagcacacactggatgcgtttgaatgtgtttgtgtagtttgttgtgaaattgttacatttagcaggcagatccagaagcactagtgaactgtcatcttggtggggttggcttaaatttaattgactgtttagattccatttcttaattgattggccagtatgaaaagatgccagtgcaagtaaccatagtatcaaaaaagttaaaaattattcaaagctatagtttatacatcaggtactgccatttactgtaaaccacctgcaagaaagtcaggaacaactaaattcacaagaactgtcctgctaagaagtgtattaaagatttccattttgttttactaattgggaacatcttaatgtttaatatttaaactattggtatcatttttctaatgtataatttgtattactgggatcaagtatgtacagtggtgatgctagtagaagtttaagccttggaaataccactttcatattttcagatgtcatggatttaatgagtaatttatgtttttaaaattcagaatagttaatctctgatctaaaaccatcaatctatgttttttacggtaatcatgtaaatatttcagtaatataaactgtttgaaaaggctgctgcaggtaaactctatactaggatcttggccaaataatttacaattcacagaatattttatttaaggtggtgctttttttttttgtccttaaaacttgatttttcttaactttattcatgatgccaaagtaaatgaggaaaaaaactcaaaaccagttgagtatcattgcagacaaaactaccagtagtccatattgtttaatattaagttgaataaaataaattttatttcagtcagagcctaaatcacattttgattgtctgaatttttgatactatttttaaaatcatgctagtggcggctgggcgtggtagctcacgcctgtaatcccagcattttgggaggccgaagtgggtggatcacgaggtcgggagttcgagaccagcttggccaaaatggtgaaaccccatctgtactaaaaactacaaaaattagctgggcgcggtggcaggtgcctgtaatcccagctacctgggagtctgaggcaggagaattgcttgaaccctggcgacagaggatgcagtgagccaagatggtgccactgtactccagactgggcgacagagtgagactctgtctcaaaaaaaaaaaaaaaatcatgctagtgccaagagctactaaattcttaaaaccggcccattggacctgtacagataaaaaatagattcagtgcataatcaaaatatgataattttaaaatcttaagtagaaaaataaatcttgatgttttaaattcttacgaggattcaatagttaatattgatgatctcccggctgggtgcagtggctcacgcctgtaatcccagcagttctggaggctgaggtgggcgaatcacttcaggccaggagttcaagaccagtctgggcaacatggtgaaacctcgtttctactaaaaatacaaaaattagccgggcgtggttgcacacacttgtaatcccagctactcaggaggctaagaatcgcatgagcctaggaggcagaggttgcagagtgccaagggctcaccactgcattccagcctgcccaacagagtgagacactgtttctgaaaaaaaaaaatatatatatatatatatatatgtgtgtatatatatatgtatatatatatgacttcctattaaaaactttatcccagtcgggggcagtggctcacgcctgtaatcccaacactttgggaggctgaggcaggtggatcacctgaagtccggagtttgagaccagcctggccaacatggtgaaaccccatctctactaaaaatacaaaacttaagccaggtatggtggcgggcacctgtaatcccagttacttgggaggctgaggcaggagaatcgtttaaacccaggaggtggaggttgcagtgagctgagatcgtgccattgcactctagcctgggcaacaagagtaaaactccatcttaaaggtttgtttgtttttttttaatccggaaacgaagaggcgttgggccgctattttctttttctttctttctttctttctttttttttttttctgagacggagtctagctctgctgcccaggctggagtacaatgacacgatgttggctcactgcaacctccacctcctgggttcaagcgattctcctgcctcagcctcccaagtacctgggattacaggcacctgccactacacctggcgaatatttgttttttttagtagagacgggcttttaccatgttaggctggtctcaaactcctgacctcaggtgatctgcctgccttggcctcccaaagtgctgggattacaggtgcaggccaccacacccggccttgggccactgttttcaaagtgaattgtttgttgtatcgagtccttaagtatggatatatatgtgaccctaattaagaactaccagattggatcaactaatcatgtcagcaatgtaaataactttatttttcatattcaaaataaaaactttcttttatttctggcccctttataaccagcatctttttgctttaaaaaatgacctggctttgtatttttttagtcttaaacataataaaaatatttttgttctaatttgctttcatgagtgaagattattgacatcgttggtaaattctagaattttgattttgttttttaatttgaagaaaatctttgctattattattttttccaagtggtctggcattttaagaattagtgctaataacgtaacttctaaatttgtcgtaattggcatgtttaatagcatatcaaaaaacattttaagcctgtggattcatagacaaagcaatgagaaacattagtaaaatataaatggatattcctgatgcatttaggaagctctcaattgtctcttgcatagttcaaggaatgttttctgaatttttttaatgctttttttttttttgaaagaggaaaacatacatttttaaatgtgattatctaatttttacaacactgggctattaggaataactttttaaaaattactgttctgtataaatatttgaaattcaagtacagaaaatatctgaaacaaaaagcattgttgtttggccatgatacaagtgcactgtggcagtgccgcttgctcaggacccagccctgcagcccttctgtgtgtgctccctcgttaagttcatttgctgttattacacacacaggccttcctgtctggtcgttagaaaagccgggcttccaaagcactgttgaacacaggattctgttgttagtgtggatgttcaatgagttgtattttaaatatcaaagattattaaataaagataatgtttgcttttcta

SEQ ID NO: 833 - DNA, 1482 bp, Homo sapiens
  source 1..1482: mol_type = genomic DNA
gcacccgcgggtttgctatggcgatgagcagcggcggcagtggtggcggcgtcccggagcaggaggattccgtgctgttccggcgcggcacaggccagagcgatgattctgacatttgggatgatacagcactgataaaagcatatgataaagctgtggcttcatttaagcatgctctaaagaatggtgacatttgtgaaacttcgggtaaaccaaaaaccacacctaaaagaaaacctgctaagaagaataaaagccaaaagaagaatactgcagcttccttacaacagtggaaagttggggacaaatgttctgccatttggtcagaagacggttgcatttacccagctaccattgcttcaattgattttaagagagaaacctgtgttgtggtttacactggatatggaaatagagaggagcaaaatctgtccgatctactttccccaatctgtgaagtagctaataatatagaacaaaatgctcaagagaatgaaaatgaaagccaagtttcaacagatgaaagtgagaactccaggtctcctggaaataaatcagataacatcaagcccaaatctgctccatggaactcttttctccctccaccaccccccatgccagggccaagactgggaccaggaaagccaggtctaaaattcaatggcccaccaccgccaccgccaccaccaccaccccacttactatcatgctggctgcctccatttccttctggaccaccaataattcccccaccacctcccatatgtccagattctcttgatgatgctgatgctttgggaagtatgttaatttcatggtacatgagtggctatcatactggctattatatgggttttagacaaaatcaaaaagaaggaaggtgctcacattccttaaattaaggagaaatgctggcatagagcagcactaaatgacaccactaaagaaacgatcagacagatctggaatgtgaagcgttatagaagataactggcctcatttcttcaaaatatcaagtgttgggaaagaaaaaaggaagtggaatgggtaactcttcttgattaaaagttatgtaataaccaaatgcaatgtgaaatattttactggactctattttgaaaaaccatctgtaaaagactgaggtgggggtgggaggccagcacggtggtgaggcagttgagaaaatttgaatgtggattagattttgaatgatattggataattattggtaattttatgagctgtgagaagggtgttgtagtttataaaagactgtcttaatttgcatacttaagcatttaggaatgaagtgttagagtgtcttaaaatgtttcaaatggtttaacaaaatgtatgtgaggcgtatgtggcaaaatgttacagaatctaactggtggacatggctgttcattgtactgtttttttctatcttctatatgtttaaaagtatataataaaaatatttaatttttttttaaatta

SEQ ID NO: 834 - DNA, 1428 bp, Homo sapiens
  source 1..1428: mol_type = genomic DNA
gcacccgcgggtttgctatggcgatgagcagcggcggcagtggtggcggcgtcccggagcaggaggattccgtgctgttccggcgcggcacaggccagagcgatgattctgacatttgggatgatacagcactgataaaagcatatgataaagctgtggcttcatttaagcatgctctaaagaatggtgacatttgtgaaacttcgggtaaaccaaaaaccacacctaaaagaaaacctgctaagaagaataaaagccaaaagaagaatactgcagcttccttacaacagtggaaagttggggacaaatgttctgccatttggtcagaagacggttgcatttacccagctaccattgcttcaattgattttaagagagaaacctgtgttgtggtttacactggatatggaaatagagaggagcaaaatctgtccgatctactttccccaatctgtgaagtagctaataatatagaacaaaatgctcaagagaatgaaaatgaaagccaagtttcaacagatgaaagtgagaactccaggtctcctggaaataaatcagataacatcaagcccaaatctgctccatggaactcttttctccctccaccaccccccatgccagggccaagactgggaccaggaaagccaggtctaaaattcaatggcccaccaccgccaccgccaccaccaccaccccacttactatcatgctggctgcctccatttccttctggaccaccaataattcccccaccacctcccatatgtccagattctcttgatgatgctgatgctttgggaagtatgttaatttcatggtacatgagtggctatcatactggctattatatggaaatgctggcatagagcagcactaaatgacaccactaaagaaacgatcagacagatctggaatgtgaagcgttatagaagataactggcctcatttcttcaaaatatcaagtgttgggaaagaaaaaaggaagtggaatgggtaactcttcttgattaaaagttatgtaataaccaaatgcaatgtgaaatattttactggactctattttgaaaaaccatctgtaaaagactgaggtgggggtgggaggccagcacggtggtgaggcagttgagaaaatttgaatgtggattagattttgaatgatattggataattattggtaattttatgagctgtgagaagggtgttgtagtttataaaagactgtcttaatttgcatacttaagcatttaggaatgaagtgttagagtgtcttaaaatgtttcaaatggtttaacaaaatgtatgtgaggcgtatgtggcaaaatgttacagaatctaactggtggacatggctgttcattgtactgtttttttctatcttctatatgtttaaaagtatataataaaaatatttaatttttttttaaatta

SEQ ID NO: 835 - DNA, 1538 bp, Homo sapiens
  source 1..1538: mol_type = genomic DNA
ccacaaatgtgggagggcgataaccactcgtagaaagcgtgagaagttactacaagcggtcctcccggccaccgtactgttccgctcccagaagccccgggcggcggaagtcgtcactcttaagaagggacggggccccacgctgcgcacccgcgggtttgctatggcgatgagcagcggcggcagtggtggcggcgtcccggagcaggaggattccgtgctgttccggcgcggcacaggccagagcgatgattctgacatttgggatgatacagcactgataaaagcatatgataaagctgtggcttcatttaagcatgctctaaagaatggtgacatttgtgaaacttcgggtaaaccaaaaaccacacctaaaagaaaacctgctaagaagaataaaagccaaaagaagaatactgcagcttccttacaacagtggaaagttggggacaaatgttctgccatttggtcagaagacggttgcatttacccagctaccattgcttcaattgattttaagagagaaacctgtgttgtggtttacactggatatggaaatagagaggagcaaaatctgtccgatctactttccccaatctgtgaagtagctaataatatagaacaaaatgctcaagagaatgaaaatgaaagccaagtttcaacagatgaaagtgagaactccaggtctcctggaaataaatcagataacatcaagcccaaatctgctccatggaactcttttctccctccaccaccccccatgccagggccaagactgggaccaggaaagataattcccccaccacctcccatatgtccagattctcttgatgatgctgatgctttgggaagtatgttaatttcatggtacatgagtggctatcatactggctattatatgggttttagacaaaatcaaaaagaaggaaggtgctcacattccttaaattaaggagaaatgctggcatagagcagcactaaatgacaccactaaagaaacgatcagacagatctggaatgtgaagcgttatagaagataactggcctcatttcttcaaaatatcaagtgttgggaaagaaaaaaggaagtggaatgggtaactcttcttgattaaaagttatgtaataaccaaatgcaatgtgaaatattttactggactctattttgaaaaaccatctgtaaaagactgaggtgggggtgggaggccagcacggtggtgaggcagttgagaaaatttgaatgtggattagattttgaatgatattggataattattggtaattttatgagctgtgagaagggtgttgtagtttataaaagactgtcttaatttgcatacttaagcatttaggaatgaagtgttagagtgtcttaaaatgtttcaaatggtttaacaaaatgtatgtgaggcgtatgtggcaaaatgttacagaatctaactggtggacatggctgttcattgtactgtttttttctatcttctatatgtttaaaagtatataataaaaatatttaatttttttttaaattaaaaaaa

SEQ ID NO: 836 - DNA, 1484 bp, Homo sapiens
  source 1..1484: mol_type = genomic DNA
ccacaaatgtgggagggcgataaccactcgtagaaagcgtgagaagttactacaagcggtcctcccggccaccgtactgttccgctcccagaagccccgggcggcggaagtcgtcactcttaagaagggacggggccccacgctgcgcacccgcgggtttgctatggcgatgagcagcggcggcagtggtggcggcgtcccggagcaggaggattccgtgctgttccggcgcggcacaggccagagcgatgattctgacatttgggatgatacagcactgataaaagcatatgataaagctgtggcttcatttaagcatgctctaaagaatggtgacatttgtgaaacttcgggtaaaccaaaaaccacacctaaaagaaaacctgctaagaagaataaaagccaaaagaagaatactgcagcttccttacaacagtggaaagttggggacaaatgttctgccatttggtcagaagacggttgcatttacccagctaccattgcttcaattgattttaagagagaaacctgtgttgtggtttacactggatatggaaatagagaggagcaaaatctgtccgatctactttccccaatctgtgaagtagctaataatatagaacaaaatgctcaagagaatgaaaatgaaagccaagtttcaacagatgaaagtgagaactccaggtctcctggaaataaatcagataacatcaagcccaaatctgctccatggaactcttttctccctccaccaccccccatgccagggccaagactgggaccaggaaagataattcccccaccacctcccatatgtccagattctcttgatgatgctgatgctttgggaagtatgttaatttcatggtacatgagtggctatcatactggctattatatggaaatgctggcatagagcagcactaaatgacaccactaaagaaacgatcagacagatctggaatgtgaagcgttatagaagataactggcctcatttcttcaaaatatcaagtgttgggaaagaaaaaaggaagtggaatgggtaactcttcttgattaaaagttatgtaataaccaaatgcaatgtgaaatattttactggactctattttgaaaaaccatctgtaaaagactgaggtgggggtgggaggccagcacggtggtgaggcagttgagaaaatttgaatgtggattagattttgaatgatattggataattattggtaattttatgagctgtgagaagggtgttgtagtttataaaagactgtcttaatttgcatacttaagcatttaggaatgaagtgttagagtgtcttaaaatgtttcaaatggtttaacaaaatgtatgtgaggcgtatgtggcaaaatgttacagaatctaactggtggacatggctgttcattgtactgtttttttctatcttctatatgtttaaaagtatataataaaaatatttaatttttttttaaattaaaaaaa

SEQ ID NO: 837 - DNA, 2130 bp, Homo sapiens
  source 1..2130: mol_type = genomic DNA
gctgctgcccaaggaccgcggagtcggacgcaggcagaccatgtggaccctggtgagctgggtggccttaacagcagggctggtggctggaacgcggtgcccagatggtcagttctgccctgtggcctgctgcctggaccccggaggagccagctacagctgctgccgtccccttctggacaaatggcccacaacactgagcaggcatctgggtggcccctgccaggttgatgcccactgctctgccggccactcctgcatctttaccgtctcagggacttccagttgctgccccttcccagaggccgtggcatgcggggatggccatcactgctgcccacggggcttccactgcagtgcagacgggcgatcctgcttccaaagatcaggtaacaactccgtgggtgccatccagtgccctgatagtcagttcgaatgcccggacttctccacgtgctgtgttatggtcgatggctcctgggggtgctgccccatgccccaggcttcctgctgtgaagacagggtgcactgctgtccgcacggtgccttctgcgacctggttcacacccgctgcatcacacccacgggcacccaccccctggcaaagaagctccctgcccagaggactaacagggcagtggccttgtccagctcggtcatgtgtccggacgcacggtcccggtgccctgatggttctacctgctgtgagctgcccagtgggaagtatggctgctgcccaatgcccaacgccacctgctgctccgatcacctgcactgctgcccccaagacactgtgtgtgacctgatccagagtaagtgcctctccaaggagaacgctaccacggacctcctcactaagctgcctgcgcacacagtgggggatgtgaaatgtgacatggaggtgagctgcccagatggctatacctgctgccgtctacagtcgggggcctggggctgctgcccttttacccaggctgtgtgctgtgaggaccacatacactgctgtcccgcggggtttacgtgtgacacgcagaagggtacctgtgaacaggggccccaccaggtgccctggatggagaaggccccagctcacctcagcctgccagacccacaagccttgaagagagatgtcccctgtgataatgtcagcagctgtccctcctccgatacctgctgccaactcacgtctggggagtggggctgctgtccaatcccagaggctgtctgctgctcggaccaccagcactgctgcccccagggctacacgtgtgtagctgaggggcagtgtcagcgaggaagcgagatcgtggctggactggagaagatgcctgcccgccgggcttccttatcccaccccagagacatcggctgtgaccagcacaccagctgcccggtggggcagacctgctgcccgagcctgggtgggagctgggcctgctgccagttgccccatgctgtgtgctgcgaggatcgccagcactgctgcccggctggctacacctgcaacgtgaaggctcgatcctgcgagaaggaagtggtctctgcccagcctgccaccttcctggcccgtagccctcacgtgggtgtgaaggacgtggagtgtggggaaggacacttctgccatgataaccagacctgctgccgagacaaccgacagggctgggcctgctgtccctaccgccagggcgtctgttgtgctgatcggcgccactgctgtcctgctggcttccgctgcgcagccaggggtaccaagtgtttgcgcagggaggccccgcgctgggacgcccctttgagggacccagccttgagacagctgctgtgagggacagtactgaagactctgcagccctcgggaccccactcggagggtgccctctgctcaggcctccctagcacctccccctaaccaaattctccctggaccccattctgagctccccatcaccatgggaggtggggcctcaatctaaggccttccctgtcagaagggggttgtggcaaaagccacattacaagctgccatcccctccccgtttcagtggaccctgtggccaggtgcttttccctatccacaggggtgtttgtgtgtgtgcgcgtgtgcgtttcaataaagtttgtacactttcttaa

SEQ ID NO: 838 - DNA, 14600 bp, Homo sapiens
  source 1..14600: mol_type = genomic DNA
actcacacacacactcgccctcaaacacaccagcccggagctgggttgcggagagggtgctccggcgcgctcagaggaccgggcagttgccgtccggagtggggcaggaagcggagctagggatcttggaggggagctcctagggcttggccggatcatgggaccgggtgagcgctgagaatcgcggccgcagccatcagccctggagatgaccaggagcggccactgctgagaactatgtggagagaggctgcgagccctgctgcagagcctccggctgggatagccgccccccgtgggggcgatgcggacagcgcgggacagccaggggagcgcgctggggccgcagcatgcgggaacccgctaaacccggtggctgctgaggcggccgagatgctcgtgcgcgcagcgcgccccactgcatcctcgaccttctcgggctacagggaccgtcagtggcgactatgggcagagtgggctattggaccctgctggtgctgccggcccttctggtctggcgcggtccggcgccgagcgcggcggcggagaagggtccccccgcgctaaatattgcggtgatgctgggtcacagccacgacgtgacagagcgcgaacttcgaacactgtggggccccgagcaggcggcggggctgcccctggacgtgaacgtggtagctctgctgatgaaccgcaccgaccccaagagcctcatcacgcacgtgtgcgacctcatgtccggggcacgcatccacggcctcgtgtttggggacgacacggaccaggaggccgtagcccagatgctggattttatctcctcccacaccttcgtccccatcttgggcattcatgggggcgcatctatgatcatggctgacaaggatccgacgtctaccttcttccagtttggagcgtccatccagcagcaagccacggtcatgctgaagatcatgcaggattatgactggcatgtcttctccctggtgaccactatcttccctggctacagggaattcatcagcttcgtcaagaccacagtggacaacagctttgtgggctgggacatgcagaatgtgatcacactggacacttcctttgaggatgcaaagacacaagtccagctgaagaagatccactcttctgtcatcttgctctactgttccaaagacgaggctgttctcattctgagtgaggcccgctcccttggcctcaccgggtatgatttcttctggattgtccccagcttggtctctgggaacacggagctcatcccaaaagagtttccatcgggactcatttctgtctcctacgatgactgggactacagcctggaggcgagagtgagggacggcattggcatcctaaccaccgctgcatcttctatgctggagaagttctcctacatccccgaggccaaggccagctgctacgggcagatggagaggccagaggtcccgatgcacaccttgcacccatttatggtcaatgttacatgggatggcaaagacttatccttcactgaggaaggctaccaggtgcaccccaggctggtggtgattgtgctgaacaaagaccgggaatgggaaaaggtgggcaagtgggagaaccatacgctgagcctgaggcacgccgtgtggcccaggtacaagtccttctccgactgtgagccggatgacaaccatctcagcatcgtcaccctggaggaggccccattcgtcatcgtggaagacatagaccccctgaccgagacgtgtgtgaggaacaccgtgccatgtcggaagttcgtcaaaatcaacaattcaaccaatgaggggatgaatgtgaagaaatgctgcaaggggttctgcattgatattctgaagaagctttccagaactgtgaagtttacttacgacctctatctggtgaccaatgggaagcatggcaagaaagttaacaatgtgtggaatggaatgatcggtgaagtggtctatcaacgggcagtcatggcagttggctcgctcaccatcaatgaggaacgttctgaagtggtggacttctctgtgccctttgtggaaacgggaatcagtgtcatggtttcaagaagtaatggcaccgtctcaccttctgcttttctagaaccattcagcgcctctgtctgggtgatgatgtttgtgatgctgctcattgtttctgccatagctgtttttgtctttgaatacttcagccctgttggatacaacagaaacttagccaaagggaaagcaccccatgggccttcttttacaattggaaaagctatatggcttctttggggcctggtgttcaataactccgtgcctgtccagaatcctaaagggaccaccagcaagatcatggtatctgtatgggccttcttcgctgtcatattcctggctagctacacagccaatctggctgccttcatgatccaagaggaatttgtggaccaagtgaccggcctcagtgacaaaaagtttcagagacctcatgactattccccaccttttcgatttgggacagtgcctaatggaagcacggagagaaacattcggaataactatccctacatgcatcagtacatgaccaaatttaatcagaaaggagtagaggacgccttggtcagcctgaaaacggggaagctggacgctttcatctacgatgccgcagtcttgaattacaaggctgggagggatgaaggctgcaagctggtgaccatcgggagtgggtacatctttgccaccaccggttatggaattgcccttcagaaaggctctccttggaagaggcagatcgacctggccttgcttcagtttgtgggtgatggtgagatggaggagctggagaccctgtggctcactgggatctgccacaacgagaagaacgaggtgatgagcagccagctggacattgacaacatggcgggcgtattctacatgctggctgccgccatggcccttagcctcatcaccttcatctgggagcacctcttctactggaagctgcgcttctgtttcacgggcgtgtgctccgaccggcctgggttgctcttctccatcagcaggggcatctacagctgcattcatggagtgcacattgaagaaaagaagaagtctccagacttcaatctgacgggatcccagagcaacatgttaaaactcctccggtcagccaaaaacatttccagcatgtccaacatgaactcctcaagaatggactcacccaaaagagctgctgacttcatccaaagaggttccctcatcatggacatggtttcagataaggggaatttgatgtactcagacaacaggtcctttcaggggaaagagagcatttttggagacaacatgaacgaactccaaacatttgtggccaaccggcagaaggataacctcaataactatgtattccagggacaacatcctcttactctcaatgagtccaaccctaacacggtggaggtggccgtgagcacagaatccaaagcgaactctagaccccggcagctgtggaagaaatccgtggattccatacgccaggattcactatcccagaatccagtctcccagagggatgaggcaacagcagagaataggacccactccctaaagagccctaggtatcttccagaagagatggcccactctgacatttcagaaacgtcaaatcgggccacgtgccacagggaacctgacaacagtaagaaccacaaaaccaaggacaactttaaaaggtcagtggcctccaaataccccaaggactgtagtgaggtcgagcgcacctacctgaaaaccaaatcaagctcccctagagacaagatctacactatagatggtgagaaggagcctggtttccacttagatccaccccagtttgttgaaaatgtgaccctgcccgagaacgtggacttcccggacccctaccaggatcccagtgaaaacttccgcaagggggactccacgctgccaatgaaccggaaccccttgcataatgaagaggggctttccaacaacgaccagtataaactctactccaagcacttcaccttgaaagacaagggttccccgcacagtgagaccagcgagcgataccggcagaactccacgcactgcagaagctgcctttccaacatgcccacctattcaggccacttcaccatgaggtcccccttcaagtgcgatgcctgcctgcggatggggaacctctatgacatcgatgaagaccagatgcttcaggagacaggtaacccagccaccggggagcaggtctaccagcaggactgggcacagaacaatgcccttcaattacaaaagaacaagctaaggattagccgtcagcattcctacgataacattgtcgacaaacctagggagctagaccttagcaggccctcccggagcataagcctcaaggacagggaacggcttctggagggaaatttttacggcagcctgtttagtgtcccctcaagcaaactctcggggaaaaaaagctcccttttcccccaaggtctggaggacagcaagaggagcaagtctctcttgccagaccacacctccgataaccctttcctccactcccacagggatgaccaacgcttggttattgggagatgcccctcggacccttacaaacactcgttgccatcccaggcggtgaatgacagctatcttcggtcgtccttgaggtcaacggcatcgtactgttccagggacagtcggggccacaatgatgtgtatatttcggagcatgttatgccttatgctgcaaataagaataatatgtactctacccccagggttttaaattcctgcagcaatagacgcgtgtacaagaaaatgcctagtatcgaatctgatgtttaaaaatcttccattaatgttttatctatagggaaatatacgtaatggccaatgttctggagggtaaatgttggatgtccaatagtgccctgctaagaggaagaagatgtagggaggtattttgttgttgttgttgttggctcttttgcacacggcttcatgccataatcttccactcaaggaatcttgtgaggtgtgtgctgagcatggcagacaccagataggtgagtccttaaccaaaaataactaactacataagggcaagtctccgggacatgcctactgggtatgttggcaataatgatgcattggatgccaatggtgatgttatgatttcctatattccaaattccattaaggtcagcccaccatgtaattttctcatcagaaatgcctaatggtttctctaatacagaataagcaatatggtgtgcatgtaaacctgacacagacaaaataaaaacagttaagaatgcatctgcactgtagtgcgattgacatgtgcaagagattaggaagtttggctcgtaacagtttcagctttcttgttatgccttccatcacagcccaggctcaccccaagaactccaggctcccctaaagaatagcaaatcagtgtgttcgtgatgactgtgctaccttcattatagttcatttccaagacacatctggagccaaaggcccgagggaccctcaggtggggagagctacaggaatctctttggatgttgatgtgtgtttctctcaccctcggcttcgatggtcttgttcagagctgcataaactaacacatttatgtctccgagatctaagtgtggatcttctgtctgtgacacagtggccattgtagtttatcccgaagacgcctatgtacgtaagtttgcatttcctcccttctggtgatgactcagggttgtatagtatctgttaccccttccctcccagagtaaccataactcgttccgtttccaaacagccatggtggtgtccaattagctgtgtatcgctcttcccagagttgttaatgtggtgacatgcaccaacagccgtatgtgtactgtgatctgtaagaagtacaatgccatctgtctgccgaaggctagcatggttttaggtttatcttccttcacatccagaaattctgttggacactcacttccaccccaaactcctcaaatcaaaagccttcaaaacacgaggcactcttggatctaccctgagtatcctccaaactgtggatacagtttagtgagacaagcaatttctcccttctgagttattctctctgttggtggcaaaccacttcatagcaccaacagagatgtaggaaaaattcctcaaagtatttgtcatttctgagtcgcctgcattatcccattcttattctcctcaaacctgtgcatatatgacatgaaatgatatccattttttttttaagttagagacagagaggggaatacttatgcatggggagcctgttagcacagtgcctgccacaaaaacaagtgcccccgacaagatagttgctatgttatgacactttctcagatcaggattttctagtttaaaaattaaatatcataaaaccagcaaataatattaactaaaccttttatatagttctactctgttaattagtgtatttcatgtacatgaatatttttgaagtatttgggataactagccatcagtgtttgcagaagacctcagtctgttttgggccattacggaaacactaagctaatgtagactcgcctggccatttcctggtttcctcctgcattctgctttacattcttgaagaaagggataaagtggcaggttgaaaaattatcccatttcttctcctcatggtgtgcgttctgttttgtaagtattattttcttgcatgtgggcaagtgtcagggatgattcccttaaagctcaaggatgcatggaatagctccatctttgggaaagtacacctgacctacagtgttcctataatgaaaagtggttgcaataaatttcagggtcaatcatagggagacagagggaggcagtgggtgagaggagcttcctttcatttttgaaaggcagaaggggctgactaggtgctggggatgcatgtgcttgaaaatgacattttatttcccggatgctgtacctctgctgccccaagacccagccatggagaagcctggatcgaagggcccagaatagtcaccccaacatctgatcctaaatctgaatctccatgactgtgtagccttttagccctttctaccttctgcccttccagtgcattccagaccttaatccaccccagcaaggatcgcctccatttcctcatgagtctgggatgttttgacatgaatgaattaaaaagtcttcccagaatacagaagagtgatttgtcgtcaagccaaagaggctttctgtcttcctctggtgtcctctaaacccagggggctgccaaatgccacagagacctccagggagagtgagagttatacttggactgacttcatcggtcagaaagccttcccctaacagcagcattatttctgctattaaccccatacatctctggataaagaaactgaaaacgtggcctttggaagaatcaacagtaatgttgtgaaaaaaatatatattcttttcactgaccgaagtgttttttcaaataaataatcagaaatgttatgctacacaaagtttatggtatcccttctctactaattcaatgactcttcaatgtgatgatcccaagcaaaaaaaaaaaaaaaaaaaaaaaatcaactactgatcagatggtcaatttctaaggaaaagatgtagagttattcaaaggtcatctaagtcagttcagtctttgcaaaaagaatatcaggaatgtaacgtccagtggtaaatggaacccacagtatgagaagtaacaagaattaaataggaagcctggaagcctgagactatagatctatcacagaagattcccgtaacatatcccagctctgagttcttagatttgttgatgtcaaggagcccaaatttctgaacacaaatgcctgagtttcagctggcttaagtcagagctggcatccataatgatattttgttaattctaattggttttccccacttgagaaggacccaactagtcctcagataggtacacttgaatgcaaacggttgggtctctgtccatgggtaatagcacgcacatgcaaccaatttaaaatactctgggtaagagagtcttctagagcataaactgtacttgagaaacctttgtgcttctggaaaatgggtttcatcatccttacatctgcaggttcttaggccacttatggtttcaatgctctgagctggcaagtccctataggtctatctttctgccagagagacttgcaggattataatctcacaatctcaccactcattactgttatgtcctctgcaaatctctctgcgttattttagccagcaccatgactgggcatccacggattactcttgattttctcttccctgattcacaggatgccagagagtctgagtatttagtttttctggtgaaagcattaaaattcacacattgcagcaaaatctgtcaaatcatttcacgcttattttctggggagaaaaatagaaaattacaccttgtttacaaatgaaatagtttcacttaaatgggactctagccaaggcagttaattagtcaaaagatccacagctgtcatatagtcacacattgtttattctatttgctatgtcgaccactgatgtgtatttaatattctgcatccttcacaggaaatgacaaatgccctgaattatttgcaaatagaattgctaatgaaaaagaaaaaaaatgttgatgttaattaaatggtgattaaaaatttatctcctttaaatctaaaaagtgcagctttaataatcagttgtcatataaataagtaccttgtactgaaatcccttgcggtttaagacctaaataaacactaatttgagaactctaaataccttacagaggagctggatatattcgttaacattatgcacattcctgtactgtttctttgtgcatagctgttgtgcatgaatccttgaaaaggggacatgcgttgtttctgaaatggagcctgtttgtattaaccatggctatagtagacatgattggactcaaagaaaaagaagtttgagtaggtggaagctaaatgtgttgcttgatatttaatgagtgaagggttctatgtaaaggcaattttccttccaaaagtactgtttattttcactggagacaaaattagacctttccagataccccatctctttttggtgaacagggttgaaagtgctgtggggtctatacttgaaaagttctcccaatatgcagttactgtttcccattcaatccctatacattgtactgtgttcatatctaattgtatcagatgaggtcagcttgccacttgatatagatcagagatgatcaaatgcacttatcctgtgaatacaactgcttgtgtacacatgtatataatatacatgcttgatttctacaattcacacgtaagtgtattatccaaataaaattgtacatattgtaaagtttatgttaaaaattaaatggtgatgatggtattaacacatggaaaacccattctggttatttttatgggaggatatttctgtagagagggcactatatttttttaatctcagttgtagggaggatgacagagcctaagtagaatatgggtgttggcgttcttggccccttctttaaaaaacaaaactctgggatgaggggtatagaatatattctgctcgcatttgcttctgaagacaatgccgatatggacttgtgtgtgatttccttaaacacatcaaagggcatagatttcctatttaaattccttatcctctttcctcacctgcactctttctgtgcccagcagtactttcagtatagtattagctagaagtgcctgcccagaagggtcttagaaaaatagagttcgtagaaccacaccaaaagttaggagaaggggaggagagatgagaaaaatgaagtttacaaatgggcagttgcctgtttaagatcatcaagttagagagtatcagagcgaggattagatccaagacatggttcaatttctggctcgattctctgaccgggctgacttatttctaggtttctttcaaggggaaactcctgagtagctctggaataagagccagagatccccataaggctgccctggtttttgttttgttttgttttttgtttttgccacttgccccagaaagacctacccatgcttctttgaatttggttttcctttaaactccctcacaatccctgtcttaaagttcctagaagagaaaacttttctcagagaccgtctccttaggaaaaatcaacagggatattgtttaaaacctcaaactgaagataaaaggctggcagtgaccattgaaataattgaggtctatgtatcatgcattgaggaagaaccaagcacattgaccagctaataggacttcactgaatgtccactttattttgaaagccagtttgggattgtgggggaggggatgcaaaataaatagaaaatatagtctcttcccataagtagcttatggtttagaagttcagttctctaatacaaaggataaccaaggacccatgcaatgcaaacagagactaaacagcaaaaattagaaatgacaactaaagttgtagccaggaaaaaaaaaataatctgattctatgagcataccttttttaaaaaaaaaaaaaaagtccttccctaaacctttaagtaactccggagaatagagttagtggtcccggaaatgcagttgatttattttaatcttcaaataatggacttaggagacccaggagctgctaaccaggtgaacacactcacactcctacatttttgcacaggaaggcttttgtctggttccaaccagttctccagtccttgccaaatcatgcctcctcccagccttgcattatgacatgtgcctcaagaaaaggttgaaaaaattccccaaaggattagaaaatagaccatgatgtaaaaagacgaagcatttccctaaagcttttttgtttggttttgtttttgacatttgaagaacccttctgatacaccagggtatgaatgtatcagggaagcatagagggaaaattctttatcaagttccaagtgcctactgctgtggctgacagaaagcatcaggttccctagagagaaaacggggcaaagagatggcaaaaggaatagaggtgtatttcaggaaggatggcgaggtggagagggagcttttgtcactctgtctatcccattctgtgcattcttggaatgttacattttctgcttatcgcaagtacttgccatggatctgcacctgaatttgaaaatatcaaaatatatctaaattgagtgtaggcgatattctaggcatatcctagaatgtgatcctcaaaacaaccttaagatataaatatgattgctcccattttacagataaggaaactgaggctcaggtttttctcaacctcgtcagcaactagaattagctagtaaatccctaacgttagacatattttcaaagtgcctggtctcctccagggaggtcagaatagaagtcagaaagagaggtgtgctcttttgaggttcctgggcatatacccttgagtatcagcctctgtgacagggaagtctgttagggtcttacccctcattgcctgatctgtgtgtatggagaacttctggggatctcacctctgttcatagttccttctgagacttgaacactgtttgtgtctccctttcatatgcttgcacttagcatttaaaaaaatttctggggagttattttctctacttagcatgtgcctaatcttaaatatctctttcctaatgtctcatctttttatcagtcaacatcagggctaattccattaaacatatatacatagtacatgctctcatgtgtgtgggtatgcacacacacacacacagccatgtgaccctccattaaagtcctcctaaatattgtgacccatgttcaaagaggtgatattatttgcaagttgactattcctcctatttcatgtctatgtttggttatctttgccaggcagatggaatgagtttcagaggtgggacagggaataggaaatagagtttctgcatgaatgatggagagctttggtagtcagaatgattgaggaccagctattaaaatgttgttgttgttttccttcttggtctgttcctttttttttttcttttccaaattgtcttagagataattcccggctcacttagcattaggataatgacggttattctgtcccactgaagagtgttgaactggaacgcttccaccgggctttataggtacccagaatggcctaatgtttaacatatcctgcaggcatgcccctgagcacacactgcctttcctgcattcccccctctccatggtctaagccacatttctttcctggcatttatatttactgagaggtgaggggtgcattaggcccatttgatggatgaggacactagcggggatttgaaggaatgtctttctgggagtctccatgaattctctggagagttagctaacttaatgcaagttaagtgctagtctatgagaaaaatttctcagctgttttcatctttcaagctggcagtaaaaagccttttaagacagaaagattattatttgttatttggagatcctgttgttgggtctacaagtgcgtgaccatgttctccttggaatgttgagctatgcagaaatggagcactccaaagaacgatttgaccaatagcatttcttctctgggggttgtatttcaaagcatgcaactctccagggaaccagaactaaattgcttaaaatgaagtcattcctcagattaacttcctcagataaagtgtcagcggtctgcagaaacgaagaagacaaaactgagattatcactcataattctcttacttactatgtcagtgaaacaatgagtttgcatttttgcaatcctagaacattcttcattagccctgggtcatgacctcttccagttaattctctttcacacctttaggaaagatttaagatgaaccttcaataggatattaacataactcatagccaataccacagctgcctttcaaattaatgaggttaattgttctccagcaaacatgagtttgtctttggcattttaaatgcttcccattgatctgacattttgctgtttcaagttttaaagggctcaaatcaaagactattgataactgagcaaagagcgaagatccagaaatacgaaaacattgtctttttttttccatgaaaaacaatcatagccttttgaattcaatcgaagtttctacattagccatctaagacttatttaattatttctgttctcagtcaagctaattcaagtgaatgaacagtattgacttttaaaatcttttttaaatttttttaaatctttagtttattaagtttgtagaaaagctctggggccatgaccacttacgtaaatgtttcagtttaaaaacaaaagattcaggcctctaatttgagccaaatccaggtgatcttgtttgaaatttttgatgaatttgaaaagatgaaagtggaacttttaacattcatgttccccaaatttttcactgggaagggatgctaattgcctacttaagatataagttcaagaataacattttcatagaaaattcagaaaactgcttgacacagcagtgacatagttagatgtggctcagatgccttccaaacctgagggtccccaaagatttctttaccagttgtttttaactatgaatcttaatcttgttcattcccctgccaaaacaaatttaaaagcataaacctgctgaattaattggcagaattcaccatagtttatatcaccccagaatgtttatgtgtatatgtttatgtatagtatatatatttcaagctgaatgttcagaaagaataaggtgagtttcttggtagcttgaataagaattagatcataaaaattataaataatggccttctcaaagaggataaatgattcatttttcactcacgtattaataatatgacttgttgcataatacacaagctggtcattgcctgcaagaaagttattgaattaagcagctatccaggtttatgtctgagtccatttttaacccaacaaggctaggattgaactccatatgcagagggtttctattcacagctacattcaaacagaatccaaaacccacatcagaactgacttgatgtcttgtatggtggagctgaaagcaagctgtctgctctaagcaatggtcttcatttgggaattaatgttcactgatcaactgcagcagtttatatctgtcatgttttaatccactgcatgaggaagtgctaataagtgtattaaatatttccaagcatagctacaaaattatatgtttgcttaacacctttctatgatagaggaagtatatactatggttgtcttcttgtagtatgtcttttaattttgttcaatgtgttatcaactgttttaaggaatggggattgaaattcgtgtgcaaactgatatgtatataactcctgaggcaacagaagtgcccggtcatatggtgtaaaaatgtaaatacaggaaaatttcatttttctaataaagataatttctgccaattgatatgaaaatga

SEQ ID NO: 839 - DNA, 14706 bp, Homo sapiens
  source 1..14706: mol_type = genomic DNA
ctctttctctccctacctccctcgctcagcagctcccggtcgcacaactcccagcagccggcgctggggaggtggtagggggtgcgggtggaggtgcccagttagcttctcgtgggtggccaacctggggctcccattctcctgtgcaccctggagtggagctcccgctatcagccacaggggctgaggatccgcactgggggcgtcgtgggcatcgggcttcagcttcccccctcttgtctagcccccctgggcgcataggggggcttgtgagcactgcagactgcagccttcccctcaaccctccctcccctcgttggtgggctgaccctgcctctccttctctcctccgccccgttagagccctgctgcagagcctccggctgggatagccgccccccgtgggggcgatgcggacagcgcgggacagccaggggagcgcgctggggccgcagcatgcgggaacccgctaaacccggtggctgctgaggcggccgagatgctcgtgcgcgcagcgcgccccactgcatcctcgaccttctcgggctacagggaccgtcagtggcgactatgggcagagtgggctattggaccctgctggtgctgccggcccttctggtctggcgcggtccggcgccgagcgcggcggcggagaagggtccccccgcgctaaatattgcggtgatgctgggtcacagccacgacgtgacagagcgcgaacttcgaacactgtggggccccgagcaggcggcggggctgcccctggacgtgaacgtggtagctctgctgatgaaccgcaccgaccccaagagcctcatcacgcacgtgtgcgacctcatgtccggggcacgcatccacggcctcgtgtttggggacgacacggaccaggaggccgtagcccagatgctggattttatctcctcccacaccttcgtccccatcttgggcattcatgggggcgcatctatgatcatggctgacaaggatccgacgtctaccttcttccagtttggagcgtccatccagcagcaagccacggtcatgctgaagatcatgcaggattatgactggcatgtcttctccctggtgaccactatcttccctggctacagggaattcatcagcttcgtcaagaccacagtggacaacagctttgtgggctgggacatgcagaatgtgatcacactggacacttcctttgaggatgcaaagacacaagtccagctgaagaagatccactcttctgtcatcttgctctactgttccaaagacgaggctgttctcattctgagtgaggcccgctcccttggcctcaccgggtatgatttcttctggattgtccccagcttggtctctgggaacacggagctcatcccaaaagagtttccatcgggactcatttctgtctcctacgatgactgggactacagcctggaggcgagagtgagggacggcattggcatcctaaccaccgctgcatcttctatgctggagaagttctcctacatccccgaggccaaggccagctgctacgggcagatggagaggccagaggtcccgatgcacaccttgcacccatttatggtcaatgttacatgggatggcaaagacttatccttcactgaggaaggctaccaggtgcaccccaggctggtggtgattgtgctgaacaaagaccgggaatgggaaaaggtgggcaagtgggagaaccatacgctgagcctgaggcacgccgtgtggcccaggtacaagtccttctccgactgtgagccggatgacaaccatctcagcatcgtcaccctggaggaggccccattcgtcatcgtggaagacatagaccccctgaccgagacgtgtgtgaggaacaccgtgccatgtcggaagttcgtcaaaatcaacaattcaaccaatgaggggatgaatgtgaagaaatgctgcaaggggttctgcattgatattctgaagaagctttccagaactgtgaagtttacttacgacctctatctggtgaccaatgggaagcatggcaagaaagttaacaatgtgtggaatggaatgatcggtgaagtggtctatcaacgggcagtcatggcagttggctcgctcaccatcaatgaggaacgttctgaagtggtggacttctctgtgccctttgtggaaacgggaatcagtgtcatggtttcaagaagtaatggcaccgtctcaccttctgcttttctagaaccattcagcgcctctgtctgggtgatgatgtttgtgatgctgctcattgtttctgccatagctgtttttgtctttgaatacttcagccctgttggatacaacagaaacttagccaaagggaaagcaccccatgggccttcttttacaattggaaaagctatatggcttctttggggcctggtgttcaataactccgtgcctgtccagaatcctaaagggaccaccagcaagatcatggtatctgtatgggccttcttcgctgtcatattcctggctagctacacagccaatctggctgccttcatgatccaagaggaatttgtggaccaagtgaccggcctcagtgacaaaaagtttcagagacctcatgactattccccaccttttcgatttgggacagtgcctaatggaagcacggagagaaacattcggaataactatccctacatgcatcagtacatgaccaaatttaatcagaaaggagtagaggacgccttggtcagcctgaaaacggggaagctggacgctttcatctacgatgccgcagtcttgaattacaaggctgggagggatgaaggctgcaagctggtgaccatcgggagtgggtacatctttgccaccaccggttatggaattgcccttcagaaaggctctccttggaagaggcagatcgacctggccttgcttcagtttgtgggtgatggtgagatggaggagctggagaccctgtggctcactgggatctgccacaacgagaagaacgaggtgatgagcagccagctggacattgacaacatggcgggcgtattctacatgctggctgccgccatggcccttagcctcatcaccttcatctgggagcacctcttctactggaagctgcgcttctgtttcacgggcgtgtgctccgaccggcctgggttgctcttctccatcagcaggggcatctacagctgcattcatggagtgcacattgaagaaaagaagaagtctccagacttcaatctgacgggatcccagagcaacatgttaaaactcctccggtcagccaaaaacatttccagcatgtccaacatgaactcctcaagaatggactcacccaaaagagctgctgacttcatccaaagaggttccctcatcatggacatggtttcagataaggggaatttgatgtactcagacaacaggtcctttcaggggaaagagagcatttttggagacaacatgaacgaactccaaacatttgtggccaaccggcagaaggataacctcaataactatgtattccagggacaacatcctcttactctcaatgagtccaaccctaacacggtggaggtggccgtgagcacagaatccaaagcgaactctagaccccggcagctgtggaagaaatccgtggattccatacgccaggattcactatcccagaatccagtctcccagagggatgaggcaacagcagagaataggacccactccctaaagagccctaggtatcttccagaagagatggcccactctgacatttcagaaacgtcaaatcgggccacgtgccacagggaacctgacaacagtaagaaccacaaaaccaaggacaactttaaaaggtcagtggcctccaaataccccaaggactgtagtgaggtcgagcgcacctacctgaaaaccaaatcaagctcccctagagacaagatctacactatagatggtgagaaggagcctggtttccacttagatccaccccagtttgttgaaaatgtgaccctgcccgagaacgtggacttcccggacccctaccaggatcccagtgaaaacttccgcaagggggactccacgctgccaatgaaccggaaccccttgcataatgaagaggggctttccaacaacgaccagtataaactctactccaagcacttcaccttgaaagacaagggttccccgcacagtgagaccagcgagcgataccggcagaactccacgcactgcagaagctgcctttccaacatgcccacctattcaggccacttcaccatgaggtcccccttcaagtgcgatgcctgcctgcggatggggaacctctatgacatcgatgaagaccagatgcttcaggagacaggtaacccagccaccggggagcaggtctaccagcaggactgggcacagaacaatgcccttcaattacaaaagaacaagctaaggattagccgtcagcattcctacgataacattgtcgacaaacctagggagctagaccttagcaggccctcccggagcataagcctcaaggacagggaacggcttctggagggaaatttttacggcagcctgtttagtgtcccctcaagcaaactctcggggaaaaaaagctcccttttcccccaaggtctggaggacagcaagaggagcaagtctctcttgccagaccacacctccgataaccctttcctccactcccacagggatgaccaacgcttggttattgggagatgcccctcggacccttacaaacactcgttgccatcccaggcggtgaatgacagctatcttcggtcgtccttgaggtcaacggcatcgtactgttccagggacagtcggggccacaatgatgtgtatatttcggagcatgttatgccttatgctgcaaataagaataatatgtactctacccccagggttttaaattcctgcagcaatagacgcgtgtacaagaaaatgcctagtatcgaatctgatgtttaaaaatcttccattaatgttttatctatagggaaatatacgtaatggccaatgttctggagggtaaatgttggatgtccaatagtgccctgctaagaggaagaagatgtagggaggtattttgttgttgttgttgttggctcttttgcacacggcttcatgccataatcttccactcaaggaatcttgtgaggtgtgtgctgagcatggcagacaccagataggtgagtccttaaccaaaaataactaactacataagggcaagtctccgggacatgcctactgggtatgttggcaataatgatgcattggatgccaatggtgatgttatgatttcctatattccaaattccattaaggtcagcccaccatgtaattttctcatcagaaatgcctaatggtttctctaatacagaataagcaatatggtgtgcatgtaaacctgacacagacaaaataaaaacagttaagaatgcatctgcactgtagtgcgattgacatgtgcaagagattaggaagtttggctcgtaacagtttcagctttcttgttatgccttccatcacagcccaggctcaccccaagaactccaggctcccctaaagaatagcaaatcagtgtgttcgtgatgactgtgctaccttcattatagttcatttccaagacacatctggagccaaaggcccgagggaccctcaggtggggagagctacaggaatctctttggatgttgatgtgtgtttctctcaccctcggcttcgatggtcttgttcagagctgcataaactaacacatttatgtctccgagatctaagtgtggatcttctgtctgtgacacagtggccattgtagtttatcccgaagacgcctatgtacgtaagtttgcatttcctcccttctggtgatgactcagggttgtatagtatctgttaccccttccctcccagagtaaccataactcgttccgtttccaaacagccatggtggtgtccaattagctgtgtatcgctcttcccagagttgttaatgtggtgacatgcaccaacagccgtatgtgtactgtgatctgtaagaagtacaatgccatctgtctgccgaaggctagcatggttttaggtttatcttccttcacatccagaaattctgttggacactcacttccaccccaaactcctcaaatcaaaagccttcaaaacacgaggcactcttggatctaccctgagtatcctccaaactgtggatacagtttagtgagacaagcaatttctcccttctgagttattctctctgttggtggcaaaccacttcatagcaccaacagagatgtaggaaaaattcctcaaagtatttgtcatttctgagtcgcctgcattatcccattcttattctcctcaaacctgtgcatatatgacatgaaatgatatccattttttttttaagttagagacagagaggggaatacttatgcatggggagcctgttagcacagtgcctgccacaaaaacaagtgcccccgacaagatagttgctatgttatgacactttctcagatcaggattttctagtttaaaaattaaatatcataaaaccagcaaataatattaactaaaccttttatatagttctactctgttaattagtgtatttcatgtacatgaatatttttgaagtatttgggataactagccatcagtgtttgcagaagacctcagtctgttttgggccattacggaaacactaagctaatgtagactcgcctggccatttcctggtttcctcctgcattctgctttacattcttgaagaaagggataaagtggcaggttgaaaaattatcccatttcttctcctcatggtgtgcgttctgttttgtaagtattattttcttgcatgtgggcaagtgtcagggatgattcccttaaagctcaaggatgcatggaatagctccatctttgggaaagtacacctgacctacagtgttcctataatgaaaagtggttgcaataaatttcagggtcaatcatagggagacagagggaggcagtgggtgagaggagcttcctttcatttttgaaaggcagaaggggctgactaggtgctggggatgcatgtgcttgaaaatgacattttatttcccggatgctgtacctctgctgccccaagacccagccatggagaagcctggatcgaagggcccagaatagtcaccccaacatctgatcctaaatctgaatctccatgactgtgtagccttttagccctttctaccttctgcccttccagtgcattccagaccttaatccaccccagcaaggatcgcctccatttcctcatgagtctgggatgttttgacatgaatgaattaaaaagtcttcccagaatacagaagagtgatttgtcgtcaagccaaagaggctttctgtcttcctctggtgtcctctaaacccagggggctgccaaatgccacagagacctccagggagagtgagagttatacttggactgacttcatcggtcagaaagccttcccctaacagcagcattatttctgctattaaccccatacatctctggataaagaaactgaaaacgtggcctttggaagaatcaacagtaatgttgtgaaaaaaatatatattcttttcactgaccgaagtgttttttcaaataaataatcagaaatgttatgctacacaaagtttatggtatcccttctctactaattcaatgactcttcaatgtgatgatcccaagcaaaaaaaaaaaaaaaaaaaaaaaatcaactactgatcagatggtcaatttctaaggaaaagatgtagagttattcaaaggtcatctaagtcagttcagtctttgcaaaaagaatatcaggaatgtaacgtccagtggtaaatggaacccacagtatgagaagtaacaagaattaaataggaagcctggaagcctgagactatagatctatcacagaagattcccgtaacatatcccagctctgagttcttagatttgttgatgtcaaggagcccaaatttctgaacacaaatgcctgagtttcagctggcttaagtcagagctggcatccataatgatattttgttaattctaattggttttccccacttgagaaggacccaactagtcctcagataggtacacttgaatgcaaacggttgggtctctgtccatgggtaatagcacgcacatgcaaccaatttaaaatactctgggtaagagagtcttctagagcataaactgtacttgagaaacctttgtgcttctggaaaatgggtttcatcatccttacatctgcaggttcttaggccacttatggtttcaatgctctgagctggcaagtccctataggtctatctttctgccagagagacttgcaggattataatctcacaatctcaccactcattactgttatgtcctctgcaaatctctctgcgttattttagccagcaccatgactgggcatccacggattactcttgattttctcttccctgattcacaggatgccagagagtctgagtatttagtttttctggtgaaagcattaaaattcacacattgcagcaaaatctgtcaaatcatttcacgcttattttctggggagaaaaatagaaaattacaccttgtttacaaatgaaatagtttcacttaaatgggactctagccaaggcagttaattagtcaaaagatccacagctgtcatatagtcacacattgtttattctatttgctatgtcgaccactgatgtgtatttaatattctgcatccttcacaggaaatgacaaatgccctgaattatttgcaaatagaattgctaatgaaaaagaaaaaaaatgttgatgttaattaaatggtgattaaaaatttatctcctttaaatctaaaaagtgcagctttaataatcagttgtcatataaataagtaccttgtactgaaatcccttgcggtttaagacctaaataaacactaatttgagaactctaaataccttacagaggagctggatatattcgttaacattatgcacattcctgtactgtttctttgtgcatagctgttgtgcatgaatccttgaaaaggggacatgcgttgtttctgaaatggagcctgtttgtattaaccatggctatagtagacatgattggactcaaagaaaaagaagtttgagtaggtggaagctaaatgtgttgcttgatatttaatgagtgaagggttctatgtaaaggcaattttccttccaaaagtactgtttattttcactggagacaaaattagacctttccagataccccatctctttttggtgaacagggttgaaagtgctgtggggtctatacttgaaaagttctcccaatatgcagttactgtttcccattcaatccctatacattgtactgtgttcatatctaattgtatcagatgaggtcagcttgccacttgatatagatcagagatgatcaaatgcacttatcctgtgaatacaactgcttgtgtacacatgtatataatatacatgcttgatttctacaattcacacgtaagtgtattatccaaataaaattgtacatattgtaaagtttatgttaaaaattaaatggtgatgatggtattaacacatggaaaacccattctggttatttttatgggaggatatttctgtagagagggcactatatttttttaatctcagttgtagggaggatgacagagcctaagtagaatatgggtgttggcgttcttggccccttctttaaaaaacaaaactctgggatgaggggtatagaatatattctgctcgcatttgcttctgaagacaatgccgatatggacttgtgtgtgatttccttaaacacatcaaagggcatagatttcctatttaaattccttatcctctttcctcacctgcactctttctgtgcccagcagtactttcagtatagtattagctagaagtgcctgcccagaagggtcttagaaaaatagagttcgtagaaccacaccaaaagttaggagaaggggaggagagatgagaaaaatgaagtttacaaatgggcagttgcctgtttaagatcatcaagttagagagtatcagagcgaggattagatccaagacatggttcaatttctggctcgattctctgaccgggctgacttatttctaggtttctttcaaggggaaactcctgagtagctctggaataagagccagagatccccataaggctgccctggtttttgttttgttttgttttttgtttttgccacttgccccagaaagacctacccatgcttctttgaatttggttttcctttaaactccctcacaatccctgtcttaaagttcctagaagagaaaacttttctcagagaccgtctccttaggaaaaatcaacagggatattgtttaaaacctcaaactgaagataaaaggctggcagtgaccattgaaataattgaggtctatgtatcatgcattgaggaagaaccaagcacattgaccagctaataggacttcactgaatgtccactttattttgaaagccagtttgggattgtgggggaggggatgcaaaataaatagaaaatatagtctcttcccataagtagcttatggtttagaagttcagttctctaatacaaaggataaccaaggacccatgcaatgcaaacagagactaaacagcaaaaattagaaatgacaactaaagttgtagccaggaaaaaaaaaataatctgattctatgagcataccttttttaaaaaaaaaaaaaaagtccttccctaaacctttaagtaactccggagaatagagttagtggtcccggaaatgcagttgatttattttaatcttcaaataatggacttaggagacccaggagctgctaaccaggtgaacacactcacactcctacatttttgcacaggaaggcttttgtctggttccaaccagttctccagtccttgccaaatcatgcctcctcccagccttgcattatgacatgtgcctcaagaaaaggttgaaaaaattccccaaaggattagaaaatagaccatgatgtaaaaagacgaagcatttccctaaagcttttttgtttggttttgtttttgacatttgaagaacccttctgatacaccagggtatgaatgtatcagggaagcatagagggaaaattctttatcaagttccaagtgcctactgctgtggctgacagaaagcatcaggttccctagagagaaaacggggcaaagagatggcaaaaggaatagaggtgtatttcaggaaggatggcgaggtggagagggagcttttgtcactctgtctatcccattctgtgcattcttggaatgttacattttctgcttatcgcaagtacttgccatggatctgcacctgaatttgaaaatatcaaaatatatctaaattgagtgtaggcgatattctaggcatatcctagaatgtgatcctcaaaacaaccttaagatataaatatgattgctcccattttacagataaggaaactgaggctcaggtttttctcaacctcgtcagcaactagaattagctagtaaatccctaacgttagacatattttcaaagtgcctggtctcctccagggaggtcagaatagaagtcagaaagagaggtgtgctcttttgaggttcctgggcatatacccttgagtatcagcctctgtgacagggaagtctgttagggtcttacccctcattgcctgatctgtgtgtatggagaacttctggggatctcacctctgttcatagttccttctgagacttgaacactgtttgtgtctccctttcatatgcttgcacttagcatttaaaaaaatttctggggagttattttctctacttagcatgtgcctaatcttaaatatctctttcctaatgtctcatctttttatcagtcaacatcagggctaattccattaaacatatatacatagtacatgctctcatgtgtgtgggtatgcacacacacacacacagccatgtgaccctccattaaagtcctcctaaatattgtgacccatgttcaaagaggtgatattatttgcaagttgactattcctcctatttcatgtctatgtttggttatctttgccaggcagatggaatgagtttcagaggtgggacagggaataggaaatagagtttctgcatgaatgatggagagctttggtagtcagaatgattgaggaccagctattaaaatgttgttgttgttttccttcttggtctgttcctttttttttttcttttccaaattgtcttagagataattcccggctcacttagcattaggataatgacggttattctgtcccactgaagagtgttgaactggaacgcttccaccgggctttataggtacccagaatggcctaatgtttaacatatcctgcaggcatgcccctgagcacacactgcctttcctgcattcccccctctccatggtctaagccacatttctttcctggcatttatatttactgagaggtgaggggtgcattaggcccatttgatggatgaggacactagcggggatttgaaggaatgtctttctgggagtctccatgaattctctggagagttagctaacttaatgcaagttaagtgctagtctatgagaaaaatttctcagctgttttcatctttcaagctggcagtaaaaagccttttaagacagaaagattattatttgttatttggagatcctgttgttgggtctacaagtgcgtgaccatgttctccttggaatgttgagctatgcagaaatggagcactccaaagaacgatttgaccaatagcatttcttctctgggggttgtatttcaaagcatgcaactctccagggaaccagaactaaattgcttaaaatgaagtcattcctcagattaacttcctcagataaagtgtcagcggtctgcagaaacgaagaagacaaaactgagattatcactcataattctcttacttactatgtcagtgaaacaatgagtttgcatttttgcaatcctagaacattcttcattagccctgggtcatgacctcttccagttaattctctttcacacctttaggaaagatttaagatgaaccttcaataggatattaacataactcatagccaataccacagctgcctttcaaattaatgaggttaattgttctccagcaaacatgagtttgtctttggcattttaaatgcttcccattgatctgacattttgctgtttcaagttttaaagggctcaaatcaaagactattgataactgagcaaagagcgaagatccagaaatacgaaaacattgtctttttttttccatgaaaaacaatcatagccttttgaattcaatcgaagtttctacattagccatctaagacttatttaattatttctgttctcagtcaagctaattcaagtgaatgaacagtattgacttttaaaatcttttttaaatttttttaaatctttagtttattaagtttgtagaaaagctctggggccatgaccacttacgtaaatgtttcagtttaaaaacaaaagattcaggcctctaatttgagccaaatccaggtgatcttgtttgaaatttttgatgaatttgaaaagatgaaagtggaacttttaacattcatgttccccaaatttttcactgggaagggatgctaattgcctacttaagatataagttcaagaataacattttcatagaaaattcagaaaactgcttgacacagcagtgacatagttagatgtggctcagatgccttccaaacctgagggtccccaaagatttctttaccagttgtttttaactatgaatcttaatcttgttcattcccctgccaaaacaaatttaaaagcataaacctgctgaattaattggcagaattcaccatagtttatatcaccccagaatgtttatgtgtatatgtttatgtatagtatatatatttcaagctgaatgttcagaaagaataaggtgagtttcttggtagcttgaataagaattagatcataaaaattataaataatggccttctcaaagaggataaatgattcatttttcactcacgtattaataatatgacttgttgcataatacacaagctggtcattgcctgcaagaaagttattgaattaagcagctatccaggtttatgtctgagtccatttttaacccaacaaggctaggattgaactccatatgcagagggtttctattcacagctacattcaaacagaatccaaaacccacatcagaactgacttgatgtcttgtatggtggagctgaaagcaagctgtctgctctaagcaatggtcttcatttgggaattaatgttcactgatcaactgcagcagtttatatctgtcatgttttaatccactgcatgaggaagtgctaataagtgtattaaatatttccaagcatagctacaaaattatatgtttgcttaacacctttctatgatagaggaagtatatactatggttgtcttcttgtagtatgtcttttaattttgttcaatgtgttatcaactgttttaaggaatggggattgaaattcgtgtgcaaactgatatgtatataactcctgaggcaacagaagtgcccggtcatatggtgtaaaaatgtaaatacaggaaaatttcatttttctaataaagataatttctgccaattgatatgaaaatga

SEQ ID NO: 840 - DNA, 14006 bp, Homo sapiens
  source 1..14006: mol_type = genomic DNA
agccctgctgcagagcctccggctgggatagccgccccccgtgggggcgatgcggacagcgcgggacagccaggggagcgcgctggggccgcagcatgcgggaacccgctaaacccggtggctgctgaggcggccgagatgctcgtgcgcgcagcgcgccccactgcatcctcgaccttctcgggctacagggaccgtcagtggcgactatgggcagagtgggctattggaccctgctggtgctgccggcccttctggtctggcgcggtccggcgccgagcgcggcggcggagaagggtccccccgcgctaaatattgcggtgatgctgggtcacagccacgacgtgacagagcgcgaacttcgaacactgtggggccccgagcaggcggcggggctgcccctggacgtgaacgtggtagctctgctgatgaaccgcaccgaccccaagagcctcatcacgcacgtgtgcgacctcatgtccggggcacgcatccacggcctcgtgtttggggacgacacggaccaggaggccgtagcccagatgctggattttatctcctcccacaccttcgtccccatcttgggcattcatgggggcgcatctatgatcatggctgacaaggatccgacgtctaccttcttccagtttggagcgtccatccagcagcaagccacggtcatgctgaagatcatgcaggattatgactggcatgtcttctccctggtgaccactatcttccctggctacagggaattcatcagcttcgtcaagaccacagtggacaacagctttgtgggctgggacatgcagaatgtgatcacactggacacttcctttgaggatgcaaagacacaagtccagctgaagaagatccactcttctgtcatcttgctctactgttccaaagacgaggctgttctcattctgagtgaggcccgctcccttggcctcaccgggtatgatttcttctggattgtccccagcttggtctctgggaacacggagctcatcccaaaagagtttccatcgggactcatttctgtctcctacgatgactgggactacagcctggaggcgagagtgagggacggcattggcatcctaaccaccgctgcatcttctatgctggagaagttctcctacatccccgaggccaaggccagctgctacgggcagatggagaggccagaggtcccgatgcacaccttgcacccatttatggtcaatgttacatgggatggcaaagacttatccttcactgaggaaggctaccaggtgcaccccaggctggtggtgattgtgctgaacaaagaccgggaatgggaaaaggtgggcaagtgggagaaccatacgctgagcctgaggcacgccgtgtggcccaggtacaagtccttctccgactgtgagccggatgacaaccatctcagcatcgtcaccctggaggaggccccattcgtcatcgtggaagacatagaccccctgaccgagacgtgtgtgaggaacaccgtgccatgtcggaagttcgtcaaaatcaacaattcaaccaatgaggggatgaatgtgaagaaatgctgcaaggggttctgcattgatattctgaagaagctttccagaactgtgaagtttacttacgacctctatctggtgaccaatgggaagcatggcaagaaagttaacaatgtgtggaatggaatgatcggtgaagtggtctatcaacgggcagtcatggcagttggctcgctcaccatcaatgaggaacgttctgaagtggtggacttctctgtgccctttgtggaaacgggaatcagtgtcatggtttcaagaagtaatggcaccgtctcaccttctgcttttctagaaccattcagcgcctctgtctgggtgatgatgtttgtgatgctgctcattgtttctgccatagctgtttttgtctttgaatacttcagccctgttggatacaacagaaacttagccaaagggaaagcaccccatgggccttcttttacaattggaaaagctatatggcttctttggggcctggtgttcaataactccgtgcctgtccagaatcctaaagggaccaccagcaagatcatggtatctgtatgggccttcttcgctgtcatattcctggctagctacacagccaatctggctgccttcatgatccaagaggaatttgtggaccaagtgaccggcctcagtgacaaaaagtttcagagacctcatgactattccccaccttttcgatttgggacagtgcctaatggaagcacggagagaaacattcggaataactatccctacatgcatcagtacatgaccaaatttaatcagaaaggagtagaggacgccttggtcagcctgaaaacggggaagctggacgctttcatctacgatgccgcagtcttgaattacaaggctgggagggatgaaggctgcaagctggtgaccatcgggagtgggtacatctttgccaccaccggttatggaattgcccttcagaaaggctctccttggaagaggcagatcgacctggccttgcttcagtttgtgggtgatggtgagatggaggagctggagaccctgtggctcactgggatctgccacaacgagaagaacgaggtgatgagcagccagctggacattgacaacatggcgggcgtattctacatgctggctgccgccatggcccttagcctcatcaccttcatctgggagcacctcttctactggaagctgcgcttctgtttcacgggcgtgtgctccgaccggcctgggttgctcttctccatcagcaggggcatctacagctgcattcatggagtgcacattgaagaaaagaagaagtctccagacttcaatctgacgggatcccagagcaacatgttaaaactcctccggtcagccaaaaacatttccagcatgtccaacatgaactcctcaagaatggactcacccaaaagagctgctgacttcatccaaagaggttccctcatcatggacatggtttcagataaggggaatttgatgtactcagacaacaggtcctttcaggggaaagagagcatttttggagacaacatgaacgaactccaaacatttgtggccaaccggcagaaggataacctcaataactatgtattccagggacaacatcctcttactctcaatgagtccaaccctaacacggtggaggtggccgtgagcacagaatccaaagcgaactctagaccccggcagctgtggaagaaatccgtggattccatacgccaggattcactatcccagaatccagtctcccagagggatgaggcaacagcagagaataggacccactccctaaagagccctaggtatcttccagaagagatggcccactctgacatttcagaaacgtcaaatcgggccacgtgccacagggaacctgacaacagtaagaaccacaaaaccaaggacaactttaaaaggtcagtggcctccaaataccccaaggactgtagtgaggtcgagcgcacctacctgaaaaccaaatcaagctcccctagagacaagatctacactatagatggtgagaaggagcctggtttccacttagatccaccccagtttgttgaaaatgtgaccctgcccgagaacgtggacttcccggacccctaccaggatcccagtgaaaacttccgcaagggggactccacgctgccaatgaaccggaaccccttgcataatgaagaggggctttccaacaacgaccagtataaactctactccaagcacttcaccttgaaagacaagggttccccgcacagtgagaccagcgagcgataccggcagaactccacgcactgcagaagctgcctttccaacatgcccacctattcaggccacttcaccatgaggtcccccttcaagtgcgatgcctgcctgcggatggggaacctctatgacatcgatgaagaccagatgcttcaggagacagggatgaccaacgcttggttattgggagatgcccctcggacccttacaaacactcgttgccatcccaggcggtgaatgacagctatcttcggtcgtccttgaggtcaacggcatcgtactgttccagggacagtcggggccacaatgatgtgtatatttcggagcatgttatgccttatgctgcaaataagaataatatgtactctacccccagggttttaaattcctgcagcaatagacgcgtgtacaagaaaatgcctagtatcgaatctgatgtttaaaaatcttccattaatgttttatctatagggaaatatacgtaatggccaatgttctggagggtaaatgttggatgtccaatagtgccctgctaagaggaagaagatgtagggaggtattttgttgttgttgttgttggctcttttgcacacggcttcatgccataatcttccactcaaggaatcttgtgaggtgtgtgctgagcatggcagacaccagataggtgagtccttaaccaaaaataactaactacataagggcaagtctccgggacatgcctactgggtatgttggcaataatgatgcattggatgccaatggtgatgttatgatttcctatattccaaattccattaaggtcagcccaccatgtaattttctcatcagaaatgcctaatggtttctctaatacagaataagcaatatggtgtgcatgtaaacctgacacagacaaaataaaaacagttaagaatgcatctgcactgtagtgcgattgacatgtgcaagagattaggaagtttggctcgtaacagtttcagctttcttgttatgccttccatcacagcccaggctcaccccaagaactccaggctcccctaaagaatagcaaatcagtgtgttcgtgatgactgtgctaccttcattatagttcatttccaagacacatctggagccaaaggcccgagggaccctcaggtggggagagctacaggaatctctttggatgttgatgtgtgtttctctcaccctcggcttcgatggtcttgttcagagctgcataaactaacacatttatgtctccgagatctaagtgtggatcttctgtctgtgacacagtggccattgtagtttatcccgaagacgcctatgtacgtaagtttgcatttcctcccttctggtgatgactcagggttgtatagtatctgttaccccttccctcccagagtaaccataactcgttccgtttccaaacagccatggtggtgtccaattagctgtgtatcgctcttcccagagttgttaatgtggtgacatgcaccaacagccgtatgtgtactgtgatctgtaagaagtacaatgccatctgtctgccgaaggctagcatggttttaggtttatcttccttcacatccagaaattctgttggacactcacttccaccccaaactcctcaaatcaaaagccttcaaaacacgaggcactcttggatctaccctgagtatcctccaaactgtggatacagtttagtgagacaagcaatttctcccttctgagttattctctctgttggtggcaaaccacttcatagcaccaacagagatgtaggaaaaattcctcaaagtatttgtcatttctgagtcgcctgcattatcccattcttattctcctcaaacctgtgcatatatgacatgaaatgatatccattttttttttaagttagagacagagaggggaatacttatgcatggggagcctgttagcacagtgcctgccacaaaaacaagtgcccccgacaagatagttgctatgttatgacactttctcagatcaggattttctagtttaaaaattaaatatcataaaaccagcaaataatattaactaaaccttttatatagttctactctgttaattagtgtatttcatgtacatgaatatttttgaagtatttgggataactagccatcagtgtttgcagaagacctcagtctgttttgggccattacggaaacactaagctaatgtagactcgcctggccatttcctggtttcctcctgcattctgctttacattcttgaagaaagggataaagtggcaggttgaaaaattatcccatttcttctcctcatggtgtgcgttctgttttgtaagtattattttcttgcatgtgggcaagtgtcagggatgattcccttaaagctcaaggatgcatggaatagctccatctttgggaaagtacacctgacctacagtgttcctataatgaaaagtggttgcaataaatttcagggtcaatcatagggagacagagggaggcagtgggtgagaggagcttcctttcatttttgaaaggcagaaggggctgactaggtgctggggatgcatgtgcttgaaaatgacattttatttcccggatgctgtacctctgctgccccaagacccagccatggagaagcctggatcgaagggcccagaatagtcaccccaacatctgatcctaaatctgaatctccatgactgtgtagccttttagccctttctaccttctgcccttccagtgcattccagaccttaatccaccccagcaaggatcgcctccatttcctcatgagtctgggatgttttgacatgaatgaattaaaaagtcttcccagaatacagaagagtgatttgtcgtcaagccaaagaggctttctgtcttcctctggtgtcctctaaacccagggggctgccaaatgccacagagacctccagggagagtgagagttatacttggactgacttcatcggtcagaaagccttcccctaacagcagcattatttctgctattaaccccatacatctctggataaagaaactgaaaacgtggcctttggaagaatcaacagtaatgttgtgaaaaaaatatatattcttttcactgaccgaagtgttttttcaaataaataatcagaaatgttatgctacacaaagtttatggtatcccttctctactaattcaatgactcttcaatgtgatgatcccaagcaaaaaaaaaaaaaaaaaaaaaaaatcaactactgatcagatggtcaatttctaaggaaaagatgtagagttattcaaaggtcatctaagtcagttcagtctttgcaaaaagaatatcaggaatgtaacgtccagtggtaaatggaacccacagtatgagaagtaacaagaattaaataggaagcctggaagcctgagactatagatctatcacagaagattcccgtaacatatcccagctctgagttcttagatttgttgatgtcaaggagcccaaatttctgaacacaaatgcctgagtttcagctggcttaagtcagagctggcatccataatgatattttgttaattctaattggttttccccacttgagaaggacccaactagtcctcagataggtacacttgaatgcaaacggttgggtctctgtccatgggtaatagcacgcacatgcaaccaatttaaaatactctgggtaagagagtcttctagagcataaactgtacttgagaaacctttgtgcttctggaaaatgggtttcatcatccttacatctgcaggttcttaggccacttatggtttcaatgctctgagctggcaagtccctataggtctatctttctgccagagagacttgcaggattataatctcacaatctcaccactcattactgttatgtcctctgcaaatctctctgcgttattttagccagcaccatgactgggcatccacggattactcttgattttctcttccctgattcacaggatgccagagagtctgagtatttagtttttctggtgaaagcattaaaattcacacattgcagcaaaatctgtcaaatcatttcacgcttattttctggggagaaaaatagaaaattacaccttgtttacaaatgaaatagtttcacttaaatgggactctagccaaggcagttaattagtcaaaagatccacagctgtcatatagtcacacattgtttattctatttgctatgtcgaccactgatgtgtatttaatattctgcatccttcacaggaaatgacaaatgccctgaattatttgcaaatagaattgctaatgaaaaagaaaaaaaatgttgatgttaattaaatggtgattaaaaatttatctcctttaaatctaaaaagtgcagctttaataatcagttgtcatataaataagtaccttgtactgaaatcccttgcggtttaagacctaaataaacactaatttgagaactctaaataccttacagaggagctggatatattcgttaacattatgcacattcctgtactgtttctttgtgcatagctgttgtgcatgaatccttgaaaaggggacatgcgttgtttctgaaatggagcctgtttgtattaaccatggctatagtagacatgattggactcaaagaaaaagaagtttgagtaggtggaagctaaatgtgttgcttgatatttaatgagtgaagggttctatgtaaaggcaattttccttccaaaagtactgtttattttcactggagacaaaattagacctttccagataccccatctctttttggtgaacagggttgaaagtgctgtggggtctatacttgaaaagttctcccaatatgcagttactgtttcccattcaatccctatacattgtactgtgttcatatctaattgtatcagatgaggtcagcttgccacttgatatagatcagagatgatcaaatgcacttatcctgtgaatacaactgcttgtgtacacatgtatataatatacatgcttgatttctacaattcacacgtaagtgtattatccaaataaaattgtacatattgtaaagtttatgttaaaaattaaatggtgatgatggtattaacacatggaaaacccattctggttatttttatgggaggatatttctgtagagagggcactatatttttttaatctcagttgtagggaggatgacagagcctaagtagaatatgggtgttggcgttcttggccccttctttaaaaaacaaaactctgggatgaggggtatagaatatattctgctcgcatttgcttctgaagacaatgccgatatggacttgtgtgtgatttccttaaacacatcaaagggcatagatttcctatttaaattccttatcctctttcctcacctgcactctttctgtgcccagcagtactttcagtatagtattagctagaagtgcctgcccagaagggtcttagaaaaatagagttcgtagaaccacaccaaaagttaggagaaggggaggagagatgagaaaaatgaagtttacaaatgggcagttgcctgtttaagatcatcaagttagagagtatcagagcgaggattagatccaagacatggttcaatttctggctcgattctctgaccgggctgacttatttctaggtttctttcaaggggaaactcctgagtagctctggaataagagccagagatccccataaggctgccctggtttttgttttgttttgttttttgtttttgccacttgccccagaaagacctacccatgcttctttgaatttggttttcctttaaactccctcacaatccctgtcttaaagttcctagaagagaaaacttttctcagagaccgtctccttaggaaaaatcaacagggatattgtttaaaacctcaaactgaagataaaaggctggcagtgaccattgaaataattgaggtctatgtatcatgcattgaggaagaaccaagcacattgaccagctaataggacttcactgaatgtccactttattttgaaagccagtttgggattgtgggggaggggatgcaaaataaatagaaaatatagtctcttcccataagtagcttatggtttagaagttcagttctctaatacaaaggataaccaaggacccatgcaatgcaaacagagactaaacagcaaaaattagaaatgacaactaaagttgtagccaggaaaaaaaaaataatctgattctatgagcataccttttttaaaaaaaaaaaaaaagtccttccctaaacctttaagtaactccggagaatagagttagtggtcccggaaatgcagttgatttattttaatcttcaaataatggacttaggagacccaggagctgctaaccaggtgaacacactcacactcctacatttttgcacaggaaggcttttgtctggttccaaccagttctccagtccttgccaaatcatgcctcctcccagccttgcattatgacatgtgcctcaagaaaaggttgaaaaaattccccaaaggattagaaaatagaccatgatgtaaaaagacgaagcatttccctaaagcttttttgtttggttttgtttttgacatttgaagaacccttctgatacaccagggtatgaatgtatcagggaagcatagagggaaaattctttatcaagttccaagtgcctactgctgtggctgacagaaagcatcaggttccctagagagaaaacggggcaaagagatggcaaaaggaatagaggtgtatttcaggaaggatggcgaggtggagagggagcttttgtcactctgtctatcccattctgtgcattcttggaatgttacattttctgcttatcgcaagtacttgccatggatctgcacctgaatttgaaaatatcaaaatatatctaaattgagtgtaggcgatattctaggcatatcctagaatgtgatcctcaaaacaaccttaagatataaatatgattgctcccattttacagataaggaaactgaggctcaggtttttctcaacctcgtcagcaactagaattagctagtaaatccctaacgttagacatattttcaaagtgcctggtctcctccagggaggtcagaatagaagtcagaaagagaggtgtgctcttttgaggttcctgggcatatacccttgagtatcagcctctgtgacagggaagtctgttagggtcttacccctcattgcctgatctgtgtgtatggagaacttctggggatctcacctctgttcatagttccttctgagacttgaacactgtttgtgtctccctttcatatgcttgcacttagcatttaaaaaaatttctggggagttattttctctacttagcatgtgcctaatcttaaatatctctttcctaatgtctcatctttttatcagtcaacatcagggctaattccattaaacatatatacatagtacatgctctcatgtgtgtgggtatgcacacacacacacacagccatgtgaccctccattaaagtcctcctaaatattgtgacccatgttcaaagaggtgatattatttgcaagttgactattcctcctatttcatgtctatgtttggttatctttgccaggcagatggaatgagtttcagaggtgggacagggaataggaaatagagtttctgcatgaatgatggagagctttggtagtcagaatgattgaggaccagctattaaaatgttgttgttgttttccttcttggtctgttcctttttttttttcttttccaaattgtcttagagataattcccggctcacttagcattaggataatgacggttattctgtcccactgaagagtgttgaactggaacgcttccaccgggctttataggtacccagaatggcctaatgtttaacatatcctgcaggcatgcccctgagcacacactgcctttcctgcattcccccctctccatggtctaagccacatttctttcctggcatttatatttactgagaggtgaggggtgcattaggcccatttgatggatgaggacactagcggggatttgaaggaatgtctttctgggagtctccatgaattctctggagagttagctaacttaatgcaagttaagtgctagtctatgagaaaaatttctcagctgttttcatctttcaagctggcagtaaaaagccttttaagacagaaagattattatttgttatttggagatcctgttgttgggtctacaagtgcgtgaccatgttctccttggaatgttgagctatgcagaaatggagcactccaaagaacgatttgaccaatagcatttcttctctgggggttgtatttcaaagcatgcaactctccagggaaccagaactaaattgcttaaaatgaagtcattcctcagattaacttcctcagataaagtgtcagcggtctgcagaaacgaagaagacaaaactgagattatcactcataattctcttacttactatgtcagtgaaacaatgagtttgcatttttgcaatcctagaacattcttcattagccctgggtcatgacctcttccagttaattctctttcacacctttaggaaagatttaagatgaaccttcaataggatattaacataactcatagccaataccacagctgcctttcaaattaatgaggttaattgttctccagcaaacatgagtttgtctttggcattttaaatgcttcccattgatctgacattttgctgtttcaagttttaaagggctcaaatcaaagactattgataactgagcaaagagcgaagatccagaaatacgaaaacattgtctttttttttccatgaaaaacaatcatagccttttgaattcaatcgaagtttctacattagccatctaagacttatttaattatttctgttctcagtcaagctaattcaagtgaatgaacagtattgacttttaaaatcttttttaaatttttttaaatctttagtttattaagtttgtagaaaagctctggggccatgaccacttacgtaaatgtttcagtttaaaaacaaaagattcaggcctctaatttgagccaaatccaggtgatcttgtttgaaatttttgatgaatttgaaaagatgaaagtggaacttttaacattcatgttccccaaatttttcactgggaagggatgctaattgcctacttaagatataagttcaagaataacattttcatagaaaattcagaaaactgcttgacacagcagtgacatagttagatgtggctcagatgccttccaaacctgagggtccccaaagatttctttaccagttgtttttaactatgaatcttaatcttgttcattcccctgccaaaacaaatttaaaagcataaacctgctgaattaattggcagaattcaccatagtttatatcaccccagaatgtttatgtgtatatgtttatgtatagtatatatatttcaagctgaatgttcagaaagaataaggtgagtttcttggtagcttgaataagaattagatcataaaaattataaataatggccttctcaaagaggataaatgattcatttttcactcacgtattaataatatgacttgttgcataatacacaagctggtcattgcctgcaagaaagttattgaattaagcagctatccaggtttatgtctgagtccatttttaacccaacaaggctaggattgaactccatatgcagagggtttctattcacagctacattcaaacagaatccaaaacccacatcagaactgacttgatgtcttgtatggtggagctgaaagcaagctgtctgctctaagcaatggtcttcatttgggaattaatgttcactgatcaactgcagcagtttatatctgtcatgttttaatccactgcatgaggaagtgctaataagtgtattaaatatttccaagcatagctacaaaattatatgtttgcttaacacctttctatgatagaggaagtatatactatggttgtcttcttgtagtatgtcttttaattttgttcaatgtgttatcaactgttttaaggaatggggattgaaattcgtgtgcaaactgatatgtatataactcctgaggcaacagaagtgcccggtcatatggtgtaaaaatgtaaatacaggaaaatttcatttttctaataaagataatttctgccaattgatatgaaaatgagaaa

SEQ ID NO: 841 - DNA, 2523 bp, Homo sapiens
  source 1..2523: mol_type = genomic DNA
agtcaagtgacgcgaagcggccggcctgggcgccgactgcagagccgggaggctggtggtcatgccggggttcctggttcgcatcctccctctgttgctggttctgctgcttctgggccctacgcgcggcttgcgcaatgccacccagaggatgtttgaaattgactatagccgggactccttcctcaaggatggccagccatttcgctacatctcaggaagcattcactactcccgtgtgccccgcttctactggaaggaccggctgctgaagatgaagatggctgggctgaacgccatccagacgtatgtgccctggaactttcatgagccctggccaggacagtaccagttttctgaggaccatgatgtggaatattttcttcggctggctcatgagctgggactgctggttatcctgaggcccgggccctacatctgtgcagagtgggaaatgggaggattacctgcttggctgctagagaaagagtctattcttctccgctcctccgacccagattacctggcagctgtggacaagtggttgggagtccttctgcccaagatgaagcctctcctctatcagaatggagggccagttataacagtgcaggttgaaaatgaatatggcagctactttgcctgtgattttgactacctgcgcttcctgcagaagcgctttcgccaccatctgggggatgatgtggttctgtttaccactgatggagcacataaaacattcctgaaatgtggggccctgcagggcctctacaccacggtggactttggaacaggcagcaacatcacagatgctttcctaagccagaggaagtgtgagcccaaaggacccttgatcaattctgaattctatactggctggctagatcactggggccaacctcactccacaatcaagaccgaagcagtggcttcctccctctatgatatacttgcccgtggggcgagtgtgaacttgtacatgtttataggtgggaccaattttgcctattggaatggggccaactcaccctatgcagcacagcccaccagctacgactatgatgccccactgagtgaggctggggacctcactgagaagtattttgctctgcgaaacatcatccagaagtttgaaaaagtaccagaaggtcctatccctccatctacaccaaagtttgcatatggaaaggtcactttggaaaagttaaagacagtgggagcagctctggacattctgtgtccctctgggcccatcaaaagcctttatcccttgacatttatccaggtgaaacagcattatgggtttgtgctgtaccggacaacacttcctcaagattgcagcaacccagcacctctctcttcacccctcaatggagtccacgatcgagcatatgttgctgtggatgggatcccccagggagtccttgagcgaaacaatgtgatcactctgaacataacagggaaagctggagccactctggaccttctggtagagaacatgggacgtgtgaactatggtgcatatatcaacgattttaagggtttggtttctaacctgactctcagttccaatatcctcacggactggacgatctttccactggacactgaggatgcagtgtgcagccacctggggggctggggacaccgtgacagtggccaccatgatgaagcctgggcccacaactcatccaactacacgctcccggccttttatatggggaacttctccattcccagtgggatcccagacttgccccaggacacctttatccagtttcctggatggaccaagggccaggtctggattaatggctttaaccttggccgctattggccagcccggggccctcagttgaccttgtttgtgccccagcacatcctgatgacctcggccccaaacaccatcaccgtgctggaactggagtgggcaccctgcagcagtgatgatccagaactatgtgctgtgacgttcgtggacaggccagttattggctcatctgtgacctacgatcatccctccaaacctgttgaaaaaagactcatgcccccacccccgcaaaaaaacaaagattcatggctggaccatgtatgatgatgaaagcctgtgtctttgagggattctaccctgaacatacctcacagatcctccctgtcatgccacatttcactgattggaatgtggaaatggaaaaggaatttaggatgtgcattttcacctgaggtttccctgcatccctgcagtgccaaagccccaccttcagggaccacctggaatgtgtgaggggctgacagcacagtaacgtgcatacatatctgcagggctggaatggaagctttaaaggtggtagtgatttttattttggaagaatcatgttacctttttgttaaataaaatttgtactcaaatgatgatgtcactgtttttaatgtgcaggtattgaattatatggtctgacttaaatcataactagacttgagtgggctgaataaaccacttcactaacttgaagttcaaaagga

SEQ ID NO: 842 - DNA, 2491 bp, Homo sapiens
  source 1..2491: mol_type = genomic DNA
ggggcgcgcgtccttccaggcagctcggtcgcttgtgcgttccgctccggccgccctttgcgcttggatccacttccccatctgtaacgaggtgttgagacgagaatgccacccagaggatgtttgaaattgactatagccgggactccttcctcaaggatggccagccatttcgctacatctcaggaagcattcactactcccgtgtgccccgcttctactggaaggaccggctgctgaagatgaagatggctgggctgaacgccatccagacgtatgtgccctggaactttcatgagccctggccaggacagtaccagttttctgaggaccatgatgtggaatattttcttcggctggctcatgagctgggactgctggttatcctgaggcccgggccctacatctgtgcagagtgggaaatgggaggattacctgcttggctgctagagaaagagtctattcttctccgctcctccgacccagattacctggcagctgtggacaagtggttgggagtccttctgcccaagatgaagcctctcctctatcagaatggagggccagttataacagtgcaggttgaaaatgaatatggcagctactttgcctgtgattttgactacctgcgcttcctgcagaagcgctttcgccaccatctgggggatgatgtggttctgtttaccactgatggagcacataaaacattcctgaaatgtggggccctgcagggcctctacaccacggtggactttggaacaggcagcaacatcacagatgctttcctaagccagaggaagtgtgagcccaaaggacccttgatcaattctgaattctatactggctggctagatcactggggccaacctcactccacaatcaagaccgaagcagtggcttcctccctctatgatatacttgcccgtggggcgagtgtgaacttgtacatgtttataggtgggaccaattttgcctattggaatggggccaactcaccctatgcagcacagcccaccagctacgactatgatgccccactgagtgaggctggggacctcactgagaagtattttgctctgcgaaacatcatccagaagtttgaaaaagtaccagaaggtcctatccctccatctacaccaaagtttgcatatggaaaggtcactttggaaaagttaaagacagtgggagcagctctggacattctgtgtccctctgggcccatcaaaagcctttatcccttgacatttatccaggtgaaacagcattatgggtttgtgctgtaccggacaacacttcctcaagattgcagcaacccagcacctctctcttcacccctcaatggagtccacgatcgagcatatgttgctgtggatgggatcccccagggagtccttgagcgaaacaatgtgatcactctgaacataacagggaaagctggagccactctggaccttctggtagagaacatgggacgtgtgaactatggtgcatatatcaacgattttaagggtttggtttctaacctgactctcagttccaatatcctcacggactggacgatctttccactggacactgaggatgcagtgtgcagccacctggggggctggggacaccgtgacagtggccaccatgatgaagcctgggcccacaactcatccaactacacgctcccggccttttatatggggaacttctccattcccagtgggatcccagacttgccccaggacacctttatccagtttcctggatggaccaagggccaggtctggattaatggctttaaccttggccgctattggccagcccggggccctcagttgaccttgtttgtgccccagcacatcctgatgacctcggccccaaacaccatcaccgtgctggaactggagtgggcaccctgcagcagtgatgatccagaactatgtgctgtgacgttcgtggacaggccagttattggctcatctgtgacctacgatcatccctccaaacctgttgaaaaaagactcatgcccccacccccgcaaaaaaacaaagattcatggctggaccatgtatgatgatgaaagcctgtgtctttgagggattctaccctgaacatacctcacagatcctccctgtcatgccacatttcactgattggaatgtggaaatggaaaaggaatttaggatgtgcattttcacctgaggtttccctgcatccctgcagtgccaaagccccaccttcagggaccacctggaatgtgtgaggggctgacagcacagtaacgtgcatacatatctgcagggctggaatggaagctttaaaggtggtagtgatttttattttggaagaatcatgttacctttttgttaaataaaatttgtactcaaatgatgatgtcactgtttttaatgtgcaggtattgaattatatggtctgacttaaatcataactagacttgagtgggctgaataaaccacttcactaacttgaagttcaaaagga

SEQ ID NO: 843 - DNA, 2130 bp, Homo sapiens
  source 1..2130: mol_type = genomic DNA
agtcaagtgacgcgaagcggccggcctgggcgccgactgcagagccgggaggctggtggtcatgccggggttcctggttcgcatcctccctctgttgctggttctgctgcttctgggccctacgcgcggcttgcgcaatgccacccagaggatgtttgaaattgactatagccgggactccttcctcaaggatggccagccatttcgctacatctcaggaagcattcactactcccgtgtgccccgcttctactggaaggaccggctgctgaagatgaagatggctgggctgaacgccatccagacattacctggcagctgtggacaagtggttgggagtccttctgcccaagatgaagcctctcctctatcagaatggagggccagttataacagtgcaggcagcaacatcacagatgctttcctaagccagaggaagtgtgagcccaaaggacccttgatcaattctgaattctatactggctggctagatcactggggccaacctcactccacaatcaagaccgaagcagtggcttcctccctctatgatatacttgcccgtggggcgagtgtgaacttgtacatgtttataggtgggaccaattttgcctattggaatggggccaactcaccctatgcagcacagcccaccagctacgactatgatgccccactgagtgaggctggggacctcactgagaagtattttgctctgcgaaacatcatccagaagtttgaaaaagtaccagaaggtcctatccctccatctacaccaaagtttgcatatggaaaggtcactttggaaaagttaaagacagtgggagcagctctggacattctgtgtccctctgggcccatcaaaagcctttatcccttgacatttatccaggtgaaacagcattatgggtttgtgctgtaccggacaacacttcctcaagattgcagcaacccagcacctctctcttcacccctcaatggagtccacgatcgagcatatgttgctgtggatgggatcccccagggagtccttgagcgaaacaatgtgatcactctgaacataacagggaaagctggagccactctggaccttctggtagagaacatgggacgtgtgaactatggtgcatatatcaacgattttaagggtttggtttctaacctgactctcagttccaatatcctcacggactggacgatctttccactggacactgaggatgcagtgtgcagccacctggggggctggggacaccgtgacagtggccaccatgatgaagcctgggcccacaactcatccaactacacgctcccggccttttatatggggaacttctccattcccagtgggatcccagacttgccccaggacacctttatccagtttcctggatggaccaagggccaggtctggattaatggctttaaccttggccgctattggccagcccggggccctcagttgaccttgtttgtgccccagcacatcctgatgacctcggccccaaacaccatcaccgtgctggaactggagtgggcaccctgcagcagtgatgatccagaactatgtgctgtgacgttcgtggacaggccagttattggctcatctgtgacctacgatcatccctccaaacctgttgaaaaaagactcatgcccccacccccgcaaaaaaacaaagattcatggctggaccatgtatgatgatgaaagcctgtgtctttgagggattctaccctgaacatacctcacagatcctccctgtcatgccacatttcactgattggaatgtggaaatggaaaaggaatttaggatgtgcattttcacctgaggtttccctgcatccctgcagtgccaaagccccaccttcagggaccacctggaatgtgtgaggggctgacagcacagtaacgtgcatacatatctgcagggctggaatggaagctttaaaggtggtagtgatttttattttggaagaatcatgttacctttttgttaaataaaatttgtactcaaatgatgatgtcactgtttttaatgtgcaggtattgaattatatggtctgacttaaatcataactagacttgagtgggctgaataaaccacttcactaacttgaagttcaaaagga

SEQ ID NO: 844 - DNA, 2667 bp, Homo sapiens
  source 1..2667: mol_type = genomic DNA
agtcaagtgacgcgaagcggccggcctgggcgccgactgcagagccgggaggctggtggtcatgccggggttcctggttcgcatcctccctctgttgctggttctgctgcttctgggccctacgcgcggcttgcgctctcgattccttccttgggcttttcatctgccacggcaagcgcctaagtctcagctgccgcttcacaaaagaggtaccaagactgcaccgaatgagcacgcaagcagcaacaggagtgggagaagaaggaggcggcagcagtggaatgccacccagaggatgtttgaaattgactatagccgggactccttcctcaaggatggccagccatttcgctacatctcaggaagcattcactactcccgtgtgccccgcttctactggaaggaccggctgctgaagatgaagatggctgggctgaacgccatccagacgtatgtgccctggaactttcatgagccctggccaggacagtaccagttttctgaggaccatgatgtggaatattttcttcggctggctcatgagctgggactgctggttatcctgaggcccgggccctacatctgtgcagagtgggaaatgggaggattacctgcttggctgctagagaaagagtctattcttctccgctcctccgacccagattacctggcagctgtggacaagtggttgggagtccttctgcccaagatgaagcctctcctctatcagaatggagggccagttataacagtgcaggttgaaaatgaatatggcagctactttgcctgtgattttgactacctgcgcttcctgcagaagcgctttcgccaccatctgggggatgatgtggttctgtttaccactgatggagcacataaaacattcctgaaatgtggggccctgcagggcctctacaccacggtggactttggaacaggcagcaacatcacagatgctttcctaagccagaggaagtgtgagcccaaaggacccttgatcaattctgaattctatactggctggctagatcactggggccaacctcactccacaatcaagaccgaagcagtggcttcctccctctatgatatacttgcccgtggggcgagtgtgaacttgtacatgtttataggtgggaccaattttgcctattggaatggggccaactcaccctatgcagcacagcccaccagctacgactatgatgccccactgagtgaggctggggacctcactgagaagtattttgctctgcgaaacatcatccagaagtttgaaaaagtaccagaaggtcctatccctccatctacaccaaagtttgcatatggaaaggtcactttggaaaagttaaagacagtgggagcagctctggacattctgtgtccctctgggcccatcaaaagcctttatcccttgacatttatccaggtgaaacagcattatgggtttgtgctgtaccggacaacacttcctcaagattgcagcaacccagcacctctctcttcacccctcaatggagtccacgatcgagcatatgttgctgtggatgggatcccccagggagtccttgagcgaaacaatgtgatcactctgaacataacagggaaagctggagccactctggaccttctggtagagaacatgggacgtgtgaactatggtgcatatatcaacgattttaagggtttggtttctaacctgactctcagttccaatatcctcacggactggacgatctttccactggacactgaggatgcagtgtgcagccacctggggggctggggacaccgtgacagtggccaccatgatgaagcctgggcccacaactcatccaactacacgctcccggccttttatatggggaacttctccattcccagtgggatcccagacttgccccaggacacctttatccagtttcctggatggaccaagggccaggtctggattaatggctttaaccttggccgctattggccagcccggggccctcagttgaccttgtttgtgccccagcacatcctgatgacctcggccccaaacaccatcaccgtgctggaactggagtgggcaccctgcagcagtgatgatccagaactatgtgctgtgacgttcgtggacaggccagttattggctcatctgtgacctacgatcatccctccaaacctgttgaaaaaagactcatgcccccacccccgcaaaaaaacaaagattcatggctggaccatgtatgatgatgaaagcctgtgtctttgagggattctaccctgaacatacctcacagatcctccctgtcatgccacatttcactgattggaatgtggaaatggaaaaggaatttaggatgtgcattttcacctgaggtttccctgcatccctgcagtgccaaagccccaccttcagggaccacctggaatgtgtgaggggctgacagcacagtaacgtgcatacatatctgcagggctggaatggaagctttaaaggtggtagtgatttttattttggaagaatcatgttacctttttgttaaataaaatttgtactcaaatgatgatgtcactgtttttaatgtgcaggtattgaattatatggtctgacttaaatcataactagacttgagtgggctgaataaaccacttcactaacttgaagttcaaaagga

SEQ ID NO: 845 - DNA, 2309 bp, Homo sapiens
  source 1..2309: mol_type = genomic DNA
agtcaagtgacgcgaagcggccggcctgggcgccgactgcagagccgggaggctggtggtcatgccggggttcctggttcgcatcctccctctgttgctggttctgctgcttctgggccctacgcgcggcttgcgcaatgccacccagaggatgtttgaaattgactatagccgggactccttcctcaaggatggccagccatttcgctacatctcaggaagcattcactactcccgtgtgccccgcttctactggaaggaccggctgctgaagatgaagatggctgggctgaacgccatccagacgtatgtgccctggaactttcatgagccctggccaggacagtaccagttttctgaggaccatgatgtggaatattttcttcggctggctcatgagctgggactgctggttatcctgaggcccgggccctacatctgtgcagagtgggaaatgggaggattacctgcttggctgctagagaaagagtctattcttctccgctcctccgacccagattacctggcagctgtggacaagtggttgggagtccttctgcccaagatgaagcctctcctctatcagaatggagggccagttataacagtgcaggttgaaaatgaatatggcagctactttgcctgtgattttgactacctgcgcttcctgcagaagcgctttcgccaccatctgggggatgatgtggttctgtttaccactgatggagcacataaaacattcctgaaatgtggggccctgcagggcctctacaccacggtggactttggaacaggcagcaacatcacagatgctttcctaagccagaggaagtgtgagcccaaaggacccttgatcaattctgaattctatactggctggctagatcactggggccaacctcactccacaatcaagaccgaagcagtggcttcctccctctatgatatacttgcccgtggggcgagtgtgaacttgtacatgtttataggtgggaccaattttgcctattggaatggggccaactcaccctatgcagcacagcccaccagctacgactatgatgccccactgagtgaggctggggacctcactgagaagtattttgctctgcgaaacatcatccagaagtttgaaaaagtaccagaaggtcctatccctccatctacaccaaagtttgcatatggaaaggtcactttggaaaagttaaagacagtgggagcagctctggacattctgtgtccctctgggcccatcaaaagcctttatcccttgacatttatccaggtgaaacagcattatgggtttgtgctgtaccggacaacacttcctcaagattgcagcaacccagcacctctctcttcacccctcaatggagtccacgatcgagcatatgttgctgtggatgggatcccccagggagtccttgagcgaaacaatgtgatcactctgaacataacagggaaagctggagccactctggaccttctggtagagaacatgggacgtgtgaactatggtgcatatatcaacgattttaagggtttggtttctaacctgactctcagttccaatatcctcacggactggacgatctttccactggacactgaggatgcagtgtgcagccacctggggggctggggacaccgtgacagtggccaccatgatgaagcctgggcccacaactcatccaactacacgctcccggccttttatatggggaacttctccattcccagtgggatcccagacttgccccaggacacctttatccagtttcctggatggaccaaggacgaaggcgatggcagcagttttccaggctagctgtcttcacaacccgatggctctcttcttttctgctgccacagagactgactgtctgcctcctgcaaatttgaaatttggcaaacctgcctcctctgcttctcagaaccaaactggggccaggagaacttctgacccaagtgttgatcacctctcttcctgcacctcactgtgcaccctctgctcaggaaatgcctttggcgtgttgctgacgtctgtccctgctccatctcttaccaccctgcacttcaccctttcccacacaggtttcacctgatctcagctgctttgggcagaccatccaggtattttggagtctgaaaaggatctctgtctctaagtctggtgcaaatggagtttgggggttttaaaattcattcttcttgctgctgtttcacaatttctcagaaaaggtgaaaatgcagactttggcagttatgttcaatatgaaaagtcttaataaagtaatttttgacctaaa

SEQ ID NO: 846 - DNA, 3492 bp, Homo sapiens
  source 1..3492: mol_type = genomic DNA
agcagatccgcggaagggcagaatgggactccaagcctgcctcctagggctctttgccctcatcctctctggcaaatgcagttacagcccggagcccgaccagcggaggacgctgcccccaggctgggtgtccctgggccgtgcggaccctgaggaagagctgagtctcacctttgccctgagacagcagaatgtggaaagactctcggagctggtgcaggctgtgtcggatcccagctctcctcaatacggaaaatacctgaccctagagaatgtggctgatctggtgaggccatccccactgaccctccacacggtgcaaaaatggctcttggcagccggagcccagaagtgccattctgtgatcacacaggactttctgacttgctggctgagcatccgacaagcagagctgctgctccctggggctgagtttcatcactatgtgggaggacctacggaaacccatgttgtaaggtccccacatccctaccagcttccacaggccttggccccccatgtggactttgtggggggactgcaccgttttcccccaacatcatccctgaggcaacgtcctgagccgcaggtgacagggactgtaggcctgcatctgggggtaaccccctctgtgatccgtaagcgatacaacttgacctcacaagacgtgggctctggcaccagcaataacagccaagcctgtgcccagttcctggagcagtatttccatgactcagacctggctcagttcatgcgcctcttcggtggcaactttgcacatcaggcatcagtagcccgtgtggttggacaacagggccggggccgggccgggattgaggccagtctagatgtgcagtacctgatgagtgctggtgccaacatctccacctgggtctacagtagccctggccggcatgagggacaggagcccttcctgcagtggctcatgctgctcagtaatgagtcagccctgccacatgtgcatactgtgagctatggagatgatgaggactccctcagcagcgcctacatccagcgggtcaacactgagctcatgaaggctgccgctcggggtctcaccctgctcttcgcctcaggtgacagtggggccgggtgttggtctgtctctggaagacaccagttccgccctaccttccctgcctccagcccctatgtcaccacagtgggaggcacatccttccaggaacctttcctcatcacaaatgaaattgttgactatatcagtggtggtggcttcagcaatgtgttcccacggccttcataccaggaggaagctgtaacgaagttcctgagctctagcccccacctgccaccatccagttacttcaatgccagtggccgtgcctacccagatgtggctgcactttctgatggctactgggtggtcagcaacagagtgcccattccatgggtgtccggaacctcggcctctactccagtgtttggggggatcctatccttgatcaatgagcacaggatccttagtggccgcccccctcttggctttctcaacccaaggctctaccagcagcatggggcaggactctttgatgtaacccgtggctgccatgagtcctgtctggatgaagaggtagagggccagggtttctgctctggtcctggctgggatcctgtaacaggctggggaacacccaacttcccagctttgctgaagactctactcaacccctgaccctttcctatcaggagagatggcttgtcccctgccctgaagctggcagttcagtcccttattctgccctgttggaagccctgctgaaccctcaactattgactgctgcagacagcttatctccctaaccctgaaatgctgtgagcttgacttgactcccaaccctaccatgctccatcatactcaggtctccctactcctgccttagattcctcaataagatgctgtaactagcattttttgaatgcctctccctccgcatctcatctttctcttttcaatcaggcttttccaaagggttgtatacagactctgtgcactatttcacttgatattcattccccaattcactgcaaggagacctctactgtcaccgtttactctttcctaccctgacatccagaaacaatggcctccagtgcatacttctcaatctttgctttatggcctttccatcatagttgcccactccctctccttacttagcttccaggtcttaacttctctgactactcttgtcttcctctctcatcaatttctgcttcttcatggaatgctgaccttcattgctccatttgtagatttttgctcttctcagtttactcattgtcccctggaacaaatcactgacatctacaaccattaccatctcactaaataagactttctatccaataatgattgatacctcaaatgtaagatgcgtgatactcaacatttcatcgtccaccttcccaaccccaaacaattccatctcgtttcttcttggtaaatgatgctatgctttttccaaccaagccagaaacctgtgtcatcttttcaccccaccttcaatcaacaagtcctcaatcaacaagtcctactgactgcacatcttaaatatatctttatcagtccacaagtccttccaattatatttcccaagtatatctagaacttatccacttatatccccactgctactaccttagtttagggctatattctcttgaaaaaaagtgtccttacttcctgccaatccccaagtcatcttccagagtaaaatgcaaatcccatcaggccacttggatgaaaacccttcaaggattactggatagaattcaggctttcccctccagcccccaatcatagctcacaaaccttccttgctatttgttcttaagtaaaaaatcatttttcctcctccctccccaaaccccaaggaactctcactcttgctcaagctgttccgtccccttaccacccctgatacaactgccaggttaatttccagaattcttgcaagactcagttcagaagtcaccttctttcgtgaatgttttgattccctgaggctactttattttggtatggctgaaaaatcctagattttctaaacaaaacctgtttgaatcttggttctgatatggactaggagagagactgggtcaagtaagcttatctccctgaggctgtttcctcgtctgttaagtgtgaatatcaatacctgcctttcataatcaccagggaataaagtggaataatgttgataacagtgcttggcacctggaagtaggtggcagatgttaacgcccttcctcccttgcactgcgccccctgtgcctacctctagcattgtaacgaccacgtagtattgaaatggccagtttacttgtctgccttcctttccaagaccgttggtgcctagaggactagaatcgtgtcctatttaactttgtgttcccaggtcctagctcaggagttggcaaataagaattaaatgtctgctacaccgaaaa

SEQ ID NO: 847 - DNA, 1070 bp, Homo sapiens
  source 1..1070: mol_type = genomic DNA
aggcccgcccgagtctccgccgcccgtgccctgcgcccgcaacccgagccgcacccgccgcggacggagcccatgcgcggggcgaaccgcgcgcccccgcccccgccccgccccggcctcggccccggccctggccccgggggcagtcgcgcctgtgaacggtggggcaggagaccctgtaggaggaccccgggccgcaggcccctgaggagcgatgacggaatataagctggtggtggtgggcgccggcggtgtgggcaagagtgcgctgaccatccagctgatccagaaccattttgtggacgaatacgaccccactatagaggattcctaccggaagcaggtggtcattgatggggagacgtgcctgttggacatcctggataccgccggccaggaggagtacagcgccatgcgggaccagtacatgcgcaccggggagggcttcctgtgtgtgtttgccatcaacaacaccaagtcttttgaggacatccaccagtacagggagcagatcaaacgggtgaaggactcggatgacgtgcccatggtgctggtggggaacaagtgtgacctggctgcacgcactgtggaatctcggcaggctcaggacctcgcccgaagctacggcatcccctacatcgagacctcggccaagacccggcagggagtggaggatgccttctacacgttggtgcgtgagatccggcagcacaagctgcggaagctgaaccctcctgatgagagtggccccggctgcatgagctgcaagtgtgtgctctcctgacgcagcacaagctcaggacatggaggtgccggatgcaggaaggaggtgcagacggaaggaggaggaaggaaggacggaagcaaggaaggaaggaagggctgctggagcccagtcaccccgggaccgtgggccgaggtgactgcagaccctcccagggaggctgtgcacagactgtcttgaacatcccaaatgccaccggaaccccagcccttagctcccctcccaggcctctgtgggcccttgtcgggcacagatgggatcacagtaaattattggatggtcttga

SEQ ID NO: 848 - DNA, 2407 bp, Homo sapiens
  source 1..2407: mol_type = genomic DNA
agtcagccgactacagagaagggtaatcgggtgtccccggcgccgcccggggccctgagggctggctagggtccaggccgggggggacgggacagacgaaccagccccgtgtaggaagcgcgacaatgccccgctacggagcgtcactccgccagagctgccccaggtccggccgggagcagggacaagacgggaccgccggagcccccggactcctttggatgggcctggtgctggcgctggcgctggcgctggcgctggcgctggctctgtctgactctcgggttctctgggctccggcagaggctcaccctctttctccccaaggccatcctgccaggttacatcgcatagtgccccggctccgagatgtctttgggtgggggaacctcacctgcccaatctgcaaaggtctattcaccgccatcaacctcgggctgaaggaacccaatgtggctcgcgtgggctccgtggccatcaagctgtgcaatctgctgaagatagcaccacctgccgtgtgccaatccattgtccacctctttgaggatgacatggtggaggtgtggagacgctcagtgctgagcccatctgaggcctgtggcctgctcctgggctccacctgtgggcactgggacattttctcatcttggaacatctctttgcctactgtgccgaagccgccccccaaaccccctagccccccagccccaggtgcccctgtcagccgcatcctcttcctcactgacctgcactgggatcatgactacctggagggcacggaccctgactgtgcagacccactgtgctgccgccggggttctggcctgccgcccgcatcccggccaggtgccggatactggggcgaatacagcaagtgtgacctgcccctgaggaccctggagagcctgttgagtgggctgggcccagccggcccttttgatatggtgtactggacaggagacatccccgcacatgatgtctggcaccagactcgtcaggaccaactgcgggccctgaccaccgtcacagcacttgtgaggaagttcctggggccagtgccagtgtaccctgctgtgggtaaccatgaaagcacacctgtcaatagcttccctccccccttcattgagggcaaccactcctcccgctggctctatgaagcgatggccaaggcttgggagccctggctgcctgccgaagccctgcgcaccctcagaattggggggttctatgctctttccccataccccggtctccgcctcatctctctcaatatgaatttttgttcccgtgagaacttctggctcttgatcaactccacggatcccgcaggacagctccagtggctggtgggggagcttcaggctgctgaggatcgaggagacaaagtgcatataattggccacattcccccagggcactgtctgaagagctggagctggaattattaccgaattgtagccaggtatgagaacaccctggctgctcagttctttggccacactcatgtggatgaatttgaggtcttctatgatgaagagactctgagccggccgctggctgtagccttcctggcacccagtgcaactacctacatcggccttaatcctggttaccgtgtgtaccaaatagatggaaactactccgggagctctcacgtggtcctggaccatgagacctacatcctgaatctgacccaggcaaacataccgggagccataccgcactggcagcttctctacagggctcgagaaacctatgggctgcccaacacactgcctaccgcctggcacaacctggtatatcgcatgcggggcgacatgcaacttttccagaccttctggtttctctaccataagggccacccaccctcggagccctgtggcacgccctgccgtctggctactctttgtgcccagctctctgcccgtgctgacagccctgctctgtgccgccacctgatgccagatgggagcctcccagaggcccagagcctgtggccaaggccactgttttgctagggccccagggcccacatttgggaaagttcttgatgtaggaaagggtgaaaaagcccaaatgctgctgtggttcaaccaggcaagatcatccggtgaaagaaccagtccctgggccccaaggatgccggggaaacaggaccttctcctttcctggagctggtttagctggatatgggagggggtttggctgcctgtgcccaggagctagactgccttgaggctgctgtcctttcacagccatggagtagaggcctaagttgacactgccctgggcagacaagacaggagctgtcgccccaggcctgtgctgcccagccaggaaccctgtactgctgctgcgacctgatgctgccagtctgttaaaataaagataagagacttggactcca

SEQ ID NO: 849 - DNA, 2430 bp, Homo sapiens
  source 1..2430: mol_type = genomic DNA
agtcagccgactacagagaagggtaatcgggtgtccccggcgccgcccggggccctgagggctggctagggtccaggccgggggggacgggacagacgaaccagccccgtgtaggaagcgcgacaatgccccgctacggagcgtcactccgccagagctgccccaggtccggccgggagcagggacaagacgggaccgccggagcccccggactcctttggatgggcctggtgctggcgctggcgctggcgctggcgctggcgctggctctgtctgactctcgggttctctgggctccggcagaggctcaccctctttctccccaaggccatcctgccaggttacatcgcatagtgccccggctccgagatgtctttgggtgggggaacctcacctgcccaatctgcaaaggtctattcaccgccatcaacctcgggctgaagaaggaacccaatgtggctcgcgtgggctccgtggccatcaagctgtgcaatctgctgaagatagcaccacctgccgtgtgccaatccattgtccacctctttgaggatgacatggtggaggtgtggagacgctcagtgctgagcccatctgaggcctgtggcctgctcctgggctccacctgtgggcactgggacattttctcatcttggaacatctctttgcctactgtgccgaagccgccccccaaaccccctagccccccagccccaggtgcccctgtcagccgcatcctcttcctcactgacctgcactgggatcatgactacctggagggcacggaccctgactgtgcagacccactgtgctgccgccggggttctggcctgccgcccgcatcccggccaggtgccggatactggggcgaatacagcaagtgtgacctgcccctgaggaccctggagagcctgttgagtgggctgggcccagccggcccttttgatatggtgtactggacaggagacatccccgcacatgatgtctggcaccagactcgtcaggaccaactgcgggccctgaccaccgtcacagcacttgtgaggaagttcctggggccagtgccagtgtaccctgctgtgggtaaccatgaaagcacacctgtcaatagcttccctccccccttcattgagggcaaccactcctcccgctggctctatgaagcgatggccaaggcttgggagccctggctgcctgccgaagccctgcgcaccctcagaattggggggttctatgctctttccccataccccggtctccgcctcatctctctcaatatgaatttttgttcccgtgagaacttctggctcttgatcaactccacggatcccgcaggacagctccagtggctggtgggggagcttcaggctgctgaggatcgaggagacaaagtgcatataattggccacattcccccagggcactgtctgaagagctggagctggaattattaccgaattgtagccaggtatgagaacaccctggctgctcagttctttggccacactcatgtggatgaatttgaggtcttctatgatgaagagactctgagccggccgctggctgtagccttcctggcacccagtgcaactacctacatcggccttaatcctgtcagccccacatccttgcaggttaccgtgtgtaccaaatagatggaaactactccgggagctctcacgtggtcctggaccatgagacctacatcctgaatctgacccaggcaaacataccgggagccataccgcactggcagcttctctacagggctcgagaaacctatgggctgcccaacacactgcctaccgcctggcacaacctggtatatcgcatgcggggcgacatgcaacttttccagaccttctggtttctctaccataagggccacccaccctcggagccctgtggcacgccctgccgtctggctactctttgtgcccagctctctgcccgtgctgacagccctgctctgtgccgccacctgatgccagatgggagcctcccagaggcccagagcctgtggccaaggccactgttttgctagggccccagggcccacatttgggaaagttcttgatgtaggaaagggtgaaaaagcccaaatgctgctgtggttcaaccaggcaagatcatccggtgaaagaaccagtccctgggccccaaggatgccggggaaacaggaccttctcctttcctggagctggtttagctggatatgggagggggtttggctgcctgtgcccaggagctagactgccttgaggctgctgtcctttcacagccatggagtagaggcctaagttgacactgccctgggcagacaagacaggagctgtcgccccaggcctgtgctgcccagccaggaaccctgtactgctgctgcgacctgatgctgccagtctgttaaaataaagataagagacttggactcca

SEQ ID NO: 850 - DNA, 2450 bp, Homo sapiens
  source 1..2450: mol_type = genomic DNA
agtcagccgactacagagaagggtaatcgggtgtccccggcgccgcccggggccctgagggctggctagggtccaggccgggggggacgggacagacgaaccagccccgtgtaggaagcgcgacaatgccccgctacggagcgtcactccgccagagctgccccaggtccggccgggagcagggacaagacgggaccgccggagcccccggactcctttggatgggcctggtgctggcgctggcgctggcgctggcgctggcgctggctctgtctgactctcgggttctctgggctccggcagaggctcaccctctttctccccaaggccatcctgccaggttacatcgcatagtgccccggctccgagatgtctttgggtgggggaacctcacctgcccaatctgcaaaggtctattcaccgccatcaacctcgggctgaagaaggaacccaatgtggctcgcgtgggctccgtggccatcaagctgtgcaatctgctgaagatagcaccacctgccgtgtgccaatccattgtccacctctttgaggatgacatggtggaggtgtggagacgctcagtgctgagcccatctgaggcctgtggcctgctcctgggctccacctgtgggcactgggacattttctcatcttggaacatctctttgcctactgtgccgaagccgccccccaaaccccctagccccccagccccaggtgcccctgtcagccgcatcctcttcctcactgacctgcactgggatcatgactacctggagggcacggaccctgactgtgcagacccactgtgctgccgccggggttctggcctgccgcccgcatcccggccaggtgccggatactggggcgaatacagcaagtgtgacctgcccctgaggaccctggagagcctgttgagtgggctgggcccagccggcccttttgatatggtgtactggacaggagacatccccgcacatgatgtctggcaccagactcgtcaggaccaactgcgggccctgaccaccgtcacagcacttgtgaggaagttcctggggccagtgccagtgtaccctgctgtgggtaaccatgaaagcacacctgtcaatagcttccctccccccttcattgagggcaaccactcctcccgctggctctatgaagcgatggccaaggcttgggagccctggctgcctgccgaagccctgcgcaccctcaggtacttatcgtccgtggaaacccaggaagggaaaagaaagaattggggggttctatgctctttccccataccccggtctccgcctcatctctctcaatatgaatttttgttcccgtgagaacttctggctcttgatcaactccacggatcccgcaggacagctccagtggctggtgggggagcttcaggctgctgaggatcgaggagacaaagtgcatataattggccacattcccccagggcactgtctgaagagctggagctggaattattaccgaattgtagccaggtatgagaacaccctggctgctcagttctttggccacactcatgtggatgaatttgaggtcttctatgatgaagagactctgagccggccgctggctgtagccttcctggcacccagtgcaactacctacatcggccttaatcctggttaccgtgtgtaccaaatagatggaaactactccgggagctctcacgtggtcctggaccatgagacctacatcctgaatctgacccaggcaaacataccgggagccataccgcactggcagcttctctacagggctcgagaaacctatgggctgcccaacacactgcctaccgcctggcacaacctggtatatcgcatgcggggcgacatgcaacttttccagaccttctggtttctctaccataagggccacccaccctcggagccctgtggcacgccctgccgtctggctactctttgtgcccagctctctgcccgtgctgacagccctgctctgtgccgccacctgatgccagatgggagcctcccagaggcccagagcctgtggccaaggccactgttttgctagggccccagggcccacatttgggaaagttcttgatgtaggaaagggtgaaaaagcccaaatgctgctgtggttcaaccaggcaagatcatccggtgaaagaaccagtccctgggccccaaggatgccggggaaacaggaccttctcctttcctggagctggtttagctggatatgggagggggtttggctgcctgtgcccaggagctagactgccttgaggctgctgtcctttcacagccatggagtagaggcctaagttgacactgccctgggcagacaagacaggagctgtcgccccaggcctgtgctgcccagccaggaaccctgtactgctgctgcgacctgatgctgccagtctgttaaaataaagataagagacttggactcca

SEQ ID NO: 851 - DNA, 2278 bp, Homo sapiens
  source 1..2278: mol_type = genomic DNA
agtcagccgactacagagaagggtaatcgggtgtccccggcgccgcccggggccctgagggctggctagggtccaggccgggggggacgggacagacgaaccagccccgtgtaggaagcgcgacaatgccccgctacggagcgtcactccgccagagctgccccaggtccggccgggagcagggacaagacgggaccgccggagcccccggactcctttggatgggcctggtgctggcgctggcgctggcgctggcgctggcgctggctctgtctgactctcgggttctctgggctccggcagaggctcaccctctttctccccaaggccatcctgccaggttacatcgcatagtgccccggctccgagatgtctttgggtgggggaacctcacctgcccaatctgcaaaggtctattcaccgccatcaacctcgggctgaagaaggaacccaatgtggctcgcgtgggctccgtggccatcaagctgtgcaatctgctgaagatagcaccacctgccgtgtgccaatccattgtccacctctttgaggatgacatggtggaggtgtggagacgctcagtgctgagcccatctgaggcctgtggcctgctcctgggctccacctgtgggcactgggacattttctcatcttggaacatctctttgcctactgtgccgaagccgccccccaaaccccctagccccccagccccaggtgcccctgtcagccgcatcctcttcctcactgacctgcactgggatcatgactacctggagggcacggaccctgactgtgcagacccactgtgctgccgccggggttctggcctgccgcccgcatcccggccaggtgccggatactggggcgaatacagcaagtgtgacctgcccctgaggaccctggagagcctgttgagtgggctgggcccagccggcccttttgatatggtgtactggacaggagacatccccgcacatgatgtctggcaccagactcgtcaggaccaactgcgggccctgaccaccgtcacagcacttgtgaggaagttcctggggccagtgccagtgtaccctgctgtgggtaaccatgaaagcacacctgtcaatagcttccctccccccttcattgagggcaaccactcctcccgctggctctatgaagcgatggccaaggcttgggagccctggctgcctgccgaagccctgcgcaccctcaggtacttatcgtccgtggaaacccaggaagggaaaagaaaggtgcatataattggccacattcccccagggcactgtctgaagagctggagctggaattattaccgaattgtagccaggtatgagaacaccctggctgctcagttctttggccacactcatgtggatgaatttgaggtcttctatgatgaagagactctgagccggccgctggctgtagccttcctggcacccagtgcaactacctacatcggccttaatcctggttaccgtgtgtaccaaatagatggaaactactccgggagctctcacgtggtcctggaccatgagacctacatcctgaatctgacccaggcaaacataccgggagccataccgcactggcagcttctctacagggctcgagaaacctatgggctgcccaacacactgcctaccgcctggcacaacctggtatatcgcatgcggggcgacatgcaacttttccagaccttctggtttctctaccataagggccacccaccctcggagccctgtggcacgccctgccgtctggctactctttgtgcccagctctctgcccgtgctgacagccctgctctgtgccgccacctgatgccagatgggagcctcccagaggcccagagcctgtggccaaggccactgttttgctagggccccagggcccacatttgggaaagttcttgatgtaggaaagggtgaaaaagcccaaatgctgctgtggttcaaccaggcaagatcatccggtgaaagaaccagtccctgggccccaaggatgccggggaaacaggaccttctcctttcctggagctggtttagctggatatgggagggggtttggctgcctgtgcccaggagctagactgccttgaggctgctgtcctttcacagccatggagtagaggcctaagttgacactgccctgggcagacaagacaggagctgtcgccccaggcctgtgctgcccagccaggaaccctgtactgctgctgcgacctgatgctgccagtctgttaaaataaagataagagacttggactcca

SEQ ID NO: 852 - DNA, 4294 bp, Homo sapiens
  source 1..4294: mol_type = genomic DNA
gaggcggaagcgcccgcagcccggtaccggctcctcctgggctccctctagcgccttccccccggcccgactccgctggtcagcgccaagtgacttacgcccccgaccctgagcccggaccgctaggcgaggaggatcagatctccgctcgagaatctgaaggtgccctggtcctggaggagttccgtcccagcccgcggtctcccggtactgtcgggccccggccctctggagcttcaggaggcggccgtcagggtcggggagtatttgggtccggggtctcagggaagggcggcgcctgggtctgcggtatcggaaagagcctgctggagccaagtagccctccctctcttgggacagacccctcggtcccatgtccatgggggcaccgcggtccctcctcctggccctggctgctggcctggccgttgcccgtccgcccaacatcgtgctgatctttgccgacgacctcggctatggggacctgggctgctatgggcaccccagctctaccactcccaacctggaccagctggcggcgggagggctgcggttcacagacttctacgtgcctgtgtctctgtgcacaccctctagggccgccctcctgaccggccggctcccggttcggatgggcatgtaccctggcgtcctggtgcccagctcccgggggggcctgcccctggaggaggtgaccgtggccgaagtcctggctgcccgaggctacctcacaggaatggccggcaagtggcaccttggggtggggcctgagggggccttcctgcccccccatcagggcttccatcgatttctaggcatcccgtactcccacgaccagggcccctgccagaacctgacctgcttcccgccggccactccttgcgacggtggctgtgaccagggcctggtccccatcccactgttggccaacctgtccgtggaggcgcagcccccctggctgcccggactagaggcccgctacatggctttcgcccatgacctcatggccgacgcccagcgccaggatcgccccttcttcctgtactatgcctctcaccacacccactaccctcagttcagtgggcagagctttgcagagcgttcaggccgcgggccatttggggactccctgatggagctggatgcagctgtggggaccctgatgacagccataggggacctggggctgcttgaagagacgctggtcatcttcactgcagacaatggacctgagaccatgcgtatgtcccgaggcggctgctccggtctcttgcggtgtggaaagggaacgacctacgagggcggtgtccgagagcctgccttggccttctggccaggtcatatcgctcccggcgtgacccacgagctggccagctccctggacctgctgcctaccctggcagccctggctggggccccactgcccaatgtcaccttggatggctttgacctcagccccctgctgctgggcacaggcaagagccctcggcagtctctcttcttctacccgtcctacccagacgaggtccgtggggtttttgctgtgcggactggaaagtacaaggctcacttcttcacccagggctctgcccacagtgataccactgcagaccctgcctgccacgcctccagctctctgactgctcatgagcccccgctgctctatgacctgtccaaggaccctggtgagaactacaacctgctggggggtgtggccggggccaccccagaggtgctgcaagccctgaaacagcttcagctgctcaaggcccagttagacgcagctgtgaccttcggccccagccaggtggcccggggcgaggaccccgccctgcagatctgctgtcatcctggctgcaccccccgcccagcttgctgccattgcccagatccccatgcctgagggcccctcggctggcctgggcatgtgatggctcctcactgggagcctgtgggggaggctcaggtgtctggagggggtttgtgcctgataacgtaataacaccagtggagacttgcagatgtgacaattcgtccaatcctggggtaatgctgtgtgctggtgccggtcccctgtggtacgaatgaggaaactgaggtgcagagaggttcaggacttgtacaagatcacccagccagaaagaggttgggctgggatttgaaccctggtgtcgtggctctggaagctgccctggcgccttggtgatctgcgtgggtcagtgcacacaggcacacgtcagcctcaaggacatgggcacatctgttcacaggagcagcgccacgtgcctttgagtgccaggaacggggtgggagggtgggagggtgtgagggccagaagactcagaagatgcaaagtgcctgagagagacgggatattcccccagaagaagcattcttagagacacaggcactggacctccttggttcttataagaaacctgtctgaagctgggtgatgagttgcacactccaggtggggctaaggggcctggagcccctgctggctcctaggaaggcacagcagcaggccctgagacggctcctctggggcccctccaccctcccaggcctctgcatttcacctgtgcccacacttctgtctcctgccttcaccttttgacccactactaacgattctccacccagcagacaaagtgatctcttaaaaatatctgttggctgggcacggtggctcacgcctgtaatcccagcactttaggaagccgaggcgggtggatcacctgaggtcgggagttcgagaccagcctgaccaacatggagaaaccccatctctactaaaaatacaaaattagccaggtgtagtggtgcatccctgtaatcccagctacttgggagtctgaggctggagaatcacttgaacctgggaggcggtggttgcagtgagccgagatcgcaccattgcactccagcctgggcaacaagagaaaaactctgtctcaaaaaacaaaaaatctgttaggctgcacacggcgattcactcctgtattcccagtgctttgggaggctgaggtgagaggatgcctgaggccaggaattcagaccagcctgggcaacatagtgagaccccagctctaaagatttgtttttgttttttttttttttttttttttttttttttttttttttttgagacggagtctcgctctgtcgcccaggctagagtgcagtggtaccatctccgctcactgcaacctccgcctcccgggttccagggattctcctgcctcagcctccctagtagctggaactacaggtgtgtgctgccatgcccagctaatttttttttatttaatagagacaagatttcaccatgttggccaggctggtctcaaactcctgacctcaggtgatccacccgcctcagcctcccaaagtgctgggattacaggtgtgaaccaccacacctggccaacaatatttgttttaattagccaggcgtggtagcatttgtcctagcaatttgggaggttgaggtgggagaatcacttcagcccactaggtcgaggctgtagtgagctataattgtaccactgcactccagcctcggggacagagtgagaccctgtctgcaaataaacaaataaaacatcaggctgggcttgagcatctattcctgctcaaaatttcgcaggcttctcagaagaaaatccaaaccccttacagtgacccagtttgcccttgaggcctccacccacacccccttccccccagtcttagggggtggcctggctgttcccttcaacggcaacgctctgcctccattgttggcctcctctgcagggagggactgtctgagcacctgcccgtgtctgtgcagcatggcacactgacgtcaggcccacgtgcatgcccaggtggccagtcacacgccaggtgctccctcagtgttggccaagtgagaggagcacaccttccgggcgttcagacacctccccgtggcagacaccgttcgttgctaccaaacagccacctccttcctaatgggctcccatttttcagtgctgggcaaaggtcccttgatcttggagttgcagcctctttctctccaaggagggcggtgaccagcctgagccagtcaatccagtgattggttcaggagtagcctgtgaccaggagtcctggtagtgaacgactggggcagccctgggggtgaggaccttgcgcagccgtcacaggccctgattggacactgggcagctgctaacccagtgtctccagctgcctacctggagagctccaagcgtaagaaaataaaccctgcctgttgaagcca

SEQ ID NO: 853 - DNA, 4189 bp, Homo sapiens
  source 1..4189: mol_type = genomic DNA
gaggcggaagcgcccgcagcccggtaccggctcctcctgggctccctctagcgccttccccccggcccgactccgctggtcagcgccaagtgacttacgcccccgaccctgagcccggaccgctaggcgaggaggatcagatctccgctcgagaatctgaaggtgccctggtcctggaggagttccgtcccagcccgcggtctcccggtactgtcgggccccggccctctggagcttcaggaggcggccgtcaggacccctcggtcccatgtccatgggggcaccgcggtccctcctcctggccctggctgctggcctggccgttgcccgtccgcccaacatcgtgctgatctttgccgacgacctcggctatggggacctgggctgctatgggcaccccagctctaccactcccaacctggaccagctggcggcgggagggctgcggttcacagacttctacgtgcctgtgtctctgtgcacaccctctagggccgccctcctgaccggccggctcccggttcggatgggcatgtaccctggcgtcctggtgcccagctcccgggggggcctgcccctggaggaggtgaccgtggccgaagtcctggctgcccgaggctacctcacaggaatggccggcaagtggcaccttggggtggggcctgagggggccttcctgcccccccatcagggcttccatcgatttctaggcatcccgtactcccacgaccagggcccctgccagaacctgacctgcttcccgccggccactccttgcgacggtggctgtgaccagggcctggtccccatcccactgttggccaacctgtccgtggaggcgcagcccccctggctgcccggactagaggcccgctacatggctttcgcccatgacctcatggccgacgcccagcgccaggatcgccccttcttcctgtactatgcctctcaccacacccactaccctcagttcagtgggcagagctttgcagagcgttcaggccgcgggccatttggggactccctgatggagctggatgcagctgtggggaccctgatgacagccataggggacctggggctgcttgaagagacgctggtcatcttcactgcagacaatggacctgagaccatgcgtatgtcccgaggcggctgctccggtctcttgcggtgtggaaagggaacgacctacgagggcggtgtccgagagcctgccttggccttctggccaggtcatatcgctcccggcgtgacccacgagctggccagctccctggacctgctgcctaccctggcagccctggctggggccccactgcccaatgtcaccttggatggctttgacctcagccccctgctgctgggcacaggcaagagccctcggcagtctctcttcttctacccgtcctacccagacgaggtccgtggggtttttgctgtgcggactggaaagtacaaggctcacttcttcacccagggctctgcccacagtgataccactgcagaccctgcctgccacgcctccagctctctgactgctcatgagcccccgctgctctatgacctgtccaaggaccctggtgagaactacaacctgctggggggtgtggccggggccaccccagaggtgctgcaagccctgaaacagcttcagctgctcaaggcccagttagacgcagctgtgaccttcggccccagccaggtggcccggggcgaggaccccgccctgcagatctgctgtcatcctggctgcaccccccgcccagcttgctgccattgcccagatccccatgcctgagggcccctcggctggcctgggcatgtgatggctcctcactgggagcctgtgggggaggctcaggtgtctggagggggtttgtgcctgataacgtaataacaccagtggagacttgcagatgtgacaattcgtccaatcctggggtaatgctgtgtgctggtgccggtcccctgtggtacgaatgaggaaactgaggtgcagagaggttcaggacttgtacaagatcacccagccagaaagaggttgggctgggatttgaaccctggtgtcgtggctctggaagctgccctggcgccttggtgatctgcgtgggtcagtgcacacaggcacacgtcagcctcaaggacatgggcacatctgttcacaggagcagcgccacgtgcctttgagtgccaggaacggggtgggagggtgggagggtgtgagggccagaagactcagaagatgcaaagtgcctgagagagacgggatattcccccagaagaagcattcttagagacacaggcactggacctccttggttcttataagaaacctgtctgaagctgggtgatgagttgcacactccaggtggggctaaggggcctggagcccctgctggctcctaggaaggcacagcagcaggccctgagacggctcctctggggcccctccaccctcccaggcctctgcatttcacctgtgcccacacttctgtctcctgccttcaccttttgacccactactaacgattctccacccagcagacaaagtgatctcttaaaaatatctgttggctgggcacggtggctcacgcctgtaatcccagcactttaggaagccgaggcgggtggatcacctgaggtcgggagttcgagaccagcctgaccaacatggagaaaccccatctctactaaaaatacaaaattagccaggtgtagtggtgcatccctgtaatcccagctacttgggagtctgaggctggagaatcacttgaacctgggaggcggtggttgcagtgagccgagatcgcaccattgcactccagcctgggcaacaagagaaaaactctgtctcaaaaaacaaaaaatctgttaggctgcacacggcgattcactcctgtattcccagtgctttgggaggctgaggtgagaggatgcctgaggccaggaattcagaccagcctgggcaacatagtgagaccccagctctaaagatttgtttttgttttttttttttttttttttttttttttttttttttttttgagacggagtctcgctctgtcgcccaggctagagtgcagtggtaccatctccgctcactgcaacctccgcctcccgggttccagggattctcctgcctcagcctccctagtagctggaactacaggtgtgtgctgccatgcccagctaatttttttttatttaatagagacaagatttcaccatgttggccaggctggtctcaaactcctgacctcaggtgatccacccgcctcagcctcccaaagtgctgggattacaggtgtgaaccaccacacctggccaacaatatttgttttaattagccaggcgtggtagcatttgtcctagcaatttgggaggttgaggtgggagaatcacttcagcccactaggtcgaggctgtagtgagctataattgtaccactgcactccagcctcggggacagagtgagaccctgtctgcaaataaacaaataaaacatcaggctgggcttgagcatctattcctgctcaaaatttcgcaggcttctcagaagaaaatccaaaccccttacagtgacccagtttgcccttgaggcctccacccacacccccttccccccagtcttagggggtggcctggctgttcccttcaacggcaacgctctgcctccattgttggcctcctctgcagggagggactgtctgagcacctgcccgtgtctgtgcagcatggcacactgacgtcaggcccacgtgcatgcccaggtggccagtcacacgccaggtgctccctcagtgttggccaagtgagaggagcacaccttccgggcgttcagacacctccccgtggcagacaccgttcgttgctaccaaacagccacctccttcctaatgggctcccatttttcagtgctgggcaaaggtcccttgatcttggagttgcagcctctttctctccaaggagggcggtgaccagcctgagccagtcaatccagtgattggttcaggagtagcctgtgaccaggagtcctggtagtgaacgactggggcagccctgggggtgaggaccttgcgcagccgtcacaggccctgattggacactgggcagctgctaacccagtgtctccagctgcctacctggagagctccaagcgtaagaaaataaaccctgcctgttgaagcca

SEQ ID NO: 854 - DNA, 4141 bp, Homo sapiens
  source 1..4141: mol_type = genomic DNA
gaggcggaagcgcccgcagcccggtaccggctcctcctgggctccctctagcgccttccccccggcccgactccgctggtcagcgccaagtgacttacgcccccgaccctgagcccggaccgctaggcgaggaggatcagatctccgctcgagaatctgaaggtgccctggtcctggaggagttccgtcccagcccgcggtctcccgacccctcggtcccatgtccatgggggcaccgcggtccctcctcctggccctggctgctggcctggccgttgcccgtccgcccaacatcgtgctgatctttgccgacgacctcggctatggggacctgggctgctatgggcaccccagctctaccactcccaacctggaccagctggcggcgggagggctgcggttcacagacttctacgtgcctgtgtctctgtgcacaccctctagggccgccctcctgaccggccggctcccggttcggatgggcatgtaccctggcgtcctggtgcccagctcccgggggggcctgcccctggaggaggtgaccgtggccgaagtcctggctgcccgaggctacctcacaggaatggccggcaagtggcaccttggggtggggcctgagggggccttcctgcccccccatcagggcttccatcgatttctaggcatcccgtactcccacgaccagggcccctgccagaacctgacctgcttcccgccggccactccttgcgacggtggctgtgaccagggcctggtccccatcccactgttggccaacctgtccgtggaggcgcagcccccctggctgcccggactagaggcccgctacatggctttcgcccatgacctcatggccgacgcccagcgccaggatcgccccttcttcctgtactatgcctctcaccacacccactaccctcagttcagtgggcagagctttgcagagcgttcaggccgcgggccatttggggactccctgatggagctggatgcagctgtggggaccctgatgacagccataggggacctggggctgcttgaagagacgctggtcatcttcactgcagacaatggacctgagaccatgcgtatgtcccgaggcggctgctccggtctcttgcggtgtggaaagggaacgacctacgagggcggtgtccgagagcctgccttggccttctggccaggtcatatcgctcccggcgtgacccacgagctggccagctccctggacctgctgcctaccctggcagccctggctggggccccactgcccaatgtcaccttggatggctttgacctcagccccctgctgctgggcacaggcaagagccctcggcagtctctcttcttctacccgtcctacccagacgaggtccgtggggtttttgctgtgcggactggaaagtacaaggctcacttcttcacccagggctctgcccacagtgataccactgcagaccctgcctgccacgcctccagctctctgactgctcatgagcccccgctgctctatgacctgtccaaggaccctggtgagaactacaacctgctggggggtgtggccggggccaccccagaggtgctgcaagccctgaaacagcttcagctgctcaaggcccagttagacgcagctgtgaccttcggccccagccaggtggcccggggcgaggaccccgccctgcagatctgctgtcatcctggctgcaccccccgcccagcttgctgccattgcccagatccccatgcctgagggcccctcggctggcctgggcatgtgatggctcctcactgggagcctgtgggggaggctcaggtgtctggagggggtttgtgcctgataacgtaataacaccagtggagacttgcagatgtgacaattcgtccaatcctggggtaatgctgtgtgctggtgccggtcccctgtggtacgaatgaggaaactgaggtgcagagaggttcaggacttgtacaagatcacccagccagaaagaggttgggctgggatttgaaccctggtgtcgtggctctggaagctgccctggcgccttggtgatctgcgtgggtcagtgcacacaggcacacgtcagcctcaaggacatgggcacatctgttcacaggagcagcgccacgtgcctttgagtgccaggaacggggtgggagggtgggagggtgtgagggccagaagactcagaagatgcaaagtgcctgagagagacgggatattcccccagaagaagcattcttagagacacaggcactggacctccttggttcttataagaaacctgtctgaagctgggtgatgagttgcacactccaggtggggctaaggggcctggagcccctgctggctcctaggaaggcacagcagcaggccctgagacggctcctctggggcccctccaccctcccaggcctctgcatttcacctgtgcccacacttctgtctcctgccttcaccttttgacccactactaacgattctccacccagcagacaaagtgatctcttaaaaatatctgttggctgggcacggtggctcacgcctgtaatcccagcactttaggaagccgaggcgggtggatcacctgaggtcgggagttcgagaccagcctgaccaacatggagaaaccccatctctactaaaaatacaaaattagccaggtgtagtggtgcatccctgtaatcccagctacttgggagtctgaggctggagaatcacttgaacctgggaggcggtggttgcagtgagccgagatcgcaccattgcactccagcctgggcaacaagagaaaaactctgtctcaaaaaacaaaaaatctgttaggctgcacacggcgattcactcctgtattcccagtgctttgggaggctgaggtgagaggatgcctgaggccaggaattcagaccagcctgggcaacatagtgagaccccagctctaaagatttgtttttgttttttttttttttttttttttttttttttttttttttttgagacggagtctcgctctgtcgcccaggctagagtgcagtggtaccatctccgctcactgcaacctccgcctcccgggttccagggattctcctgcctcagcctccctagtagctggaactacaggtgtgtgctgccatgcccagctaatttttttttatttaatagagacaagatttcaccatgttggccaggctggtctcaaactcctgacctcaggtgatccacccgcctcagcctcccaaagtgctgggattacaggtgtgaaccaccacacctggccaacaatatttgttttaattagccaggcgtggtagcatttgtcctagcaatttgggaggttgaggtgggagaatcacttcagcccactaggtcgaggctgtagtgagctataattgtaccactgcactccagcctcggggacagagtgagaccctgtctgcaaataaacaaataaaacatcaggctgggcttgagcatctattcctgctcaaaatttcgcaggcttctcagaagaaaatccaaaccccttacagtgacccagtttgcccttgaggcctccacccacacccccttccccccagtcttagggggtggcctggctgttcccttcaacggcaacgctctgcctccattgttggcctcctctgcagggagggactgtctgagcacctgcccgtgtctgtgcagcatggcacactgacgtcaggcccacgtgcatgcccaggtggccagtcacacgccaggtgctccctcagtgttggccaagtgagaggagcacaccttccgggcgttcagacacctccccgtggcagacaccgttcgttgctaccaaacagccacctccttcctaatgggctcccatttttcagtgctgggcaaaggtcccttgatcttggagttgcagcctctttctctccaaggagggcggtgaccagcctgagccagtcaatccagtgattggttcaggagtagcctgtgaccaggagtcctggtagtgaacgactggggcagccctgggggtgaggaccttgcgcagccgtcacaggccctgattggacactgggcagctgctaacccagtgtctccagctgcctacctggagagctccaagcgtaagaaaataaaccctgcctgttgaagcca

SEQ ID NO: 855 - DNA, 4096 bp, Homo sapiens
  source 1..4096: mol_type = genomic DNA
gaggcggaagcgcccgcagcccggtaccggctcctcctgggctccctctagcgccttccccccggcccgactccgctggtcagcgccaagtgacttacgcccccgaccctgagcccggaccgctaggcgaggaggatcagatctccgctcgagaatctgaagacccctcggtcccatgtccatgggggcaccgcggtccctcctcctggccctggctgctggcctggccgttgcccgtccgcccaacatcgtgctgatctttgccgacgacctcggctatggggacctgggctgctatgggcaccccagctctaccactcccaacctggaccagctggcggcgggagggctgcggttcacagacttctacgtgcctgtgtctctgtgcacaccctctagggccgccctcctgaccggccggctcccggttcggatgggcatgtaccctggcgtcctggtgcccagctcccgggggggcctgcccctggaggaggtgaccgtggccgaagtcctggctgcccgaggctacctcacaggaatggccggcaagtggcaccttggggtggggcctgagggggccttcctgcccccccatcagggcttccatcgatttctaggcatcccgtactcccacgaccagggcccctgccagaacctgacctgcttcccgccggccactccttgcgacggtggctgtgaccagggcctggtccccatcccactgttggccaacctgtccgtggaggcgcagcccccctggctgcccggactagaggcccgctacatggctttcgcccatgacctcatggccgacgcccagcgccaggatcgccccttcttcctgtactatgcctctcaccacacccactaccctcagttcagtgggcagagctttgcagagcgttcaggccgcgggccatttggggactccctgatggagctggatgcagctgtggggaccctgatgacagccataggggacctggggctgcttgaagagacgctggtcatcttcactgcagacaatggacctgagaccatgcgtatgtcccgaggcggctgctccggtctcttgcggtgtggaaagggaacgacctacgagggcggtgtccgagagcctgccttggccttctggccaggtcatatcgctcccggcgtgacccacgagctggccagctccctggacctgctgcctaccctggcagccctggctggggccccactgcccaatgtcaccttggatggctttgacctcagccccctgctgctgggcacaggcaagagccctcggcagtctctcttcttctacccgtcctacccagacgaggtccgtggggtttttgctgtgcggactggaaagtacaaggctcacttcttcacccagggctctgcccacagtgataccactgcagaccctgcctgccacgcctccagctctctgactgctcatgagcccccgctgctctatgacctgtccaaggaccctggtgagaactacaacctgctggggggtgtggccggggccaccccagaggtgctgcaagccctgaaacagcttcagctgctcaaggcccagttagacgcagctgtgaccttcggccccagccaggtggcccggggcgaggaccccgccctgcagatctgctgtcatcctggctgcaccccccgcccagcttgctgccattgcccagatccccatgcctgagggcccctcggctggcctgggcatgtgatggctcctcactgggagcctgtgggggaggctcaggtgtctggagggggtttgtgcctgataacgtaataacaccagtggagacttgcagatgtgacaattcgtccaatcctggggtaatgctgtgtgctggtgccggtcccctgtggtacgaatgaggaaactgaggtgcagagaggttcaggacttgtacaagatcacccagccagaaagaggttgggctgggatttgaaccctggtgtcgtggctctggaagctgccctggcgccttggtgatctgcgtgggtcagtgcacacaggcacacgtcagcctcaaggacatgggcacatctgttcacaggagcagcgccacgtgcctttgagtgccaggaacggggtgggagggtgggagggtgtgagggccagaagactcagaagatgcaaagtgcctgagagagacgggatattcccccagaagaagcattcttagagacacaggcactggacctccttggttcttataagaaacctgtctgaagctgggtgatgagttgcacactccaggtggggctaaggggcctggagcccctgctggctcctaggaaggcacagcagcaggccctgagacggctcctctggggcccctccaccctcccaggcctctgcatttcacctgtgcccacacttctgtctcctgccttcaccttttgacccactactaacgattctccacccagcagacaaagtgatctcttaaaaatatctgttggctgggcacggtggctcacgcctgtaatcccagcactttaggaagccgaggcgggtggatcacctgaggtcgggagttcgagaccagcctgaccaacatggagaaaccccatctctactaaaaatacaaaattagccaggtgtagtggtgcatccctgtaatcccagctacttgggagtctgaggctggagaatcacttgaacctgggaggcggtggttgcagtgagccgagatcgcaccattgcactccagcctgggcaacaagagaaaaactctgtctcaaaaaacaaaaaatctgttaggctgcacacggcgattcactcctgtattcccagtgctttgggaggctgaggtgagaggatgcctgaggccaggaattcagaccagcctgggcaacatagtgagaccccagctctaaagatttgtttttgttttttttttttttttttttttttttttttttttttttttgagacggagtctcgctctgtcgcccaggctagagtgcagtggtaccatctccgctcactgcaacctccgcctcccgggttccagggattctcctgcctcagcctccctagtagctggaactacaggtgtgtgctgccatgcccagctaatttttttttatttaatagagacaagatttcaccatgttggccaggctggtctcaaactcctgacctcaggtgatccacccgcctcagcctcccaaagtgctgggattacaggtgtgaaccaccacacctggccaacaatatttgttttaattagccaggcgtggtagcatttgtcctagcaatttgggaggttgaggtgggagaatcacttcagcccactaggtcgaggctgtagtgagctataattgtaccactgcactccagcctcggggacagagtgagaccctgtctgcaaataaacaaataaaacatcaggctgggcttgagcatctattcctgctcaaaatttcgcaggcttctcagaagaaaatccaaaccccttacagtgacccagtttgcccttgaggcctccacccacacccccttccccccagtcttagggggtggcctggctgttcccttcaacggcaacgctctgcctccattgttggcctcctctgcagggagggactgtctgagcacctgcccgtgtctgtgcagcatggcacactgacgtcaggcccacgtgcatgcccaggtggccagtcacacgccaggtgctccctcagtgttggccaagtgagaggagcacaccttccgggcgttcagacacctccccgtggcagacaccgttcgttgctaccaaacagccacctccttcctaatgggctcccatttttcagtgctgggcaaaggtcccttgatcttggagttgcagcctctttctctccaaggagggcggtgaccagcctgagccagtcaatccagtgattggttcaggagtagcctgtgaccaggagtcctggtagtgaacgactggggcagccctgggggtgaggaccttgcgcagccgtcacaggccctgattggacactgggcagctgctaacccagtgtctccagctgcctacctggagagctccaagcgtaagaaaataaaccctgcctgttgaagcca

SEQ ID NO: 856 - DNA, 3904 bp, Homo sapiens
  source 1..3904: mol_type = genomic DNA
gaggcggaagcgcccgcagcccggtaccggctcctcctgggctccctctagcgccttccccccggcccgactccgctggtcagcgccaagtgacttacgcccccgaccctgagcccggaccgctaggcgaggaggatcagatctccgctcgagaatctgaaggtgccctggtcctggaggagttccgtcccagcccgcggtctcccgggccgccctcctgaccggccggctcccggttcggatgggcatgtaccctggcgtcctggtgcccagctcccgggggggcctgcccctggaggaggtgaccgtggccgaagtcctggctgcccgaggctacctcacaggaatggccggcaagtggcaccttggggtggggcctgagggggccttcctgcccccccatcagggcttccatcgatttctaggcatcccgtactcccacgaccagggcccctgccagaacctgacctgcttcccgccggccactccttgcgacggtggctgtgaccagggcctggtccccatcccactgttggccaacctgtccgtggaggcgcagcccccctggctgcccggactagaggcccgctacatggctttcgcccatgacctcatggccgacgcccagcgccaggatcgccccttcttcctgtactatgcctctcaccacacccactaccctcagttcagtgggcagagctttgcagagcgttcaggccgcgggccatttggggactccctgatggagctggatgcagctgtggggaccctgatgacagccataggggacctggggctgcttgaagagacgctggtcatcttcactgcagacaatggacctgagaccatgcgtatgtcccgaggcggctgctccggtctcttgcggtgtggaaagggaacgacctacgagggcggtgtccgagagcctgccttggccttctggccaggtcatatcgctcccggcgtgacccacgagctggccagctccctggacctgctgcctaccctggcagccctggctggggccccactgcccaatgtcaccttggatggctttgacctcagccccctgctgctgggcacaggcaagagccctcggcagtctctcttcttctacccgtcctacccagacgaggtccgtggggtttttgctgtgcggactggaaagtacaaggctcacttcttcacccagggctctgcccacagtgataccactgcagaccctgcctgccacgcctccagctctctgactgctcatgagcccccgctgctctatgacctgtccaaggaccctggtgagaactacaacctgctggggggtgtggccggggccaccccagaggtgctgcaagccctgaaacagcttcagctgctcaaggcccagttagacgcagctgtgaccttcggccccagccaggtggcccggggcgaggaccccgccctgcagatctgctgtcatcctggctgcaccccccgcccagcttgctgccattgcccagatccccatgcctgagggcccctcggctggcctgggcatgtgatggctcctcactgggagcctgtgggggaggctcaggtgtctggagggggtttgtgcctgataacgtaataacaccagtggagacttgcagatgtgacaattcgtccaatcctggggtaatgctgtgtgctggtgccggtcccctgtggtacgaatgaggaaactgaggtgcagagaggttcaggacttgtacaagatcacccagccagaaagaggttgggctgggatttgaaccctggtgtcgtggctctggaagctgccctggcgccttggtgatctgcgtgggtcagtgcacacaggcacacgtcagcctcaaggacatgggcacatctgttcacaggagcagcgccacgtgcctttgagtgccaggaacggggtgggagggtgggagggtgtgagggccagaagactcagaagatgcaaagtgcctgagagagacgggatattcccccagaagaagcattcttagagacacaggcactggacctccttggttcttataagaaacctgtctgaagctgggtgatgagttgcacactccaggtggggctaaggggcctggagcccctgctggctcctaggaaggcacagcagcaggccctgagacggctcctctggggcccctccaccctcccaggcctctgcatttcacctgtgcccacacttctgtctcctgccttcaccttttgacccactactaacgattctccacccagcagacaaagtgatctcttaaaaatatctgttggctgggcacggtggctcacgcctgtaatcccagcactttaggaagccgaggcgggtggatcacctgaggtcgggagttcgagaccagcctgaccaacatggagaaaccccatctctactaaaaatacaaaattagccaggtgtagtggtgcatccctgtaatcccagctacttgggagtctgaggctggagaatcacttgaacctgggaggcggtggttgcagtgagccgagatcgcaccattgcactccagcctgggcaacaagagaaaaactctgtctcaaaaaacaaaaaatctgttaggctgcacacggcgattcactcctgtattcccagtgctttgggaggctgaggtgagaggatgcctgaggccaggaattcagaccagcctgggcaacatagtgagaccccagctctaaagatttgtttttgttttttttttttttttttttttttttttttttttttttttgagacggagtctcgctctgtcgcccaggctagagtgcagtggtaccatctccgctcactgcaacctccgcctcccgggttccagggattctcctgcctcagcctccctagtagctggaactacaggtgtgtgctgccatgcccagctaatttttttttatttaatagagacaagatttcaccatgttggccaggctggtctcaaactcctgacctcaggtgatccacccgcctcagcctcccaaagtgctgggattacaggtgtgaaccaccacacctggccaacaatatttgttttaattagccaggcgtggtagcatttgtcctagcaatttgggaggttgaggtgggagaatcacttcagcccactaggtcgaggctgtagtgagctataattgtaccactgcactccagcctcggggacagagtgagaccctgtctgcaaataaacaaataaaacatcaggctgggcttgagcatctattcctgctcaaaatttcgcaggcttctcagaagaaaatccaaaccccttacagtgacccagtttgcccttgaggcctccacccacacccccttccccccagtcttagggggtggcctggctgttcccttcaacggcaacgctctgcctccattgttggcctcctctgcagggagggactgtctgagcacctgcccgtgtctgtgcagcatggcacactgacgtcaggcccacgtgcatgcccaggtggccagtcacacgccaggtgctccctcagtgttggccaagtgagaggagcacaccttccgggcgttcagacacctccccgtggcagacaccgttcgttgctaccaaacagccacctccttcctaatgggctcccatttttcagtgctgggcaaaggtcccttgatcttggagttgcagcctctttctctccaaggagggcggtgaccagcctgagccagtcaatccagtgattggttcaggagtagcctgtgaccaggagtcctggtagtgaacgactggggcagccctgggggtgaggaccttgcgcagccgtcacaggccctgattggacactgggcagctgctaacccagtgtctccagctgcctacctggagagctccaagcgtaagaaaataaaccctgcctgttgaagcca

SEQ ID NO: 857 - DNA, 3859 bp, Homo sapiens
  source 1..3859: mol_type = genomic DNA
gaggcggaagcgcccgcagcccggtaccggctcctcctgggctccctctagcgccttccccccggcccgactccgctggtcagcgccaagtgacttacgcccccgaccctgagcccggaccgctaggcgaggaggatcagatctccgctcgagaatctgaagggccgccctcctgaccggccggctcccggttcggatgggcatgtaccctggcgtcctggtgcccagctcccgggggggcctgcccctggaggaggtgaccgtggccgaagtcctggctgcccgaggctacctcacaggaatggccggcaagtggcaccttggggtggggcctgagggggccttcctgcccccccatcagggcttccatcgatttctaggcatcccgtactcccacgaccagggcccctgccagaacctgacctgcttcccgccggccactccttgcgacggtggctgtgaccagggcctggtccccatcccactgttggccaacctgtccgtggaggcgcagcccccctggctgcccggactagaggcccgctacatggctttcgcccatgacctcatggccgacgcccagcgccaggatcgccccttcttcctgtactatgcctctcaccacacccactaccctcagttcagtgggcagagctttgcagagcgttcaggccgcgggccatttggggactccctgatggagctggatgcagctgtggggaccctgatgacagccataggggacctggggctgcttgaagagacgctggtcatcttcactgcagacaatggacctgagaccatgcgtatgtcccgaggcggctgctccggtctcttgcggtgtggaaagggaacgacctacgagggcggtgtccgagagcctgccttggccttctggccaggtcatatcgctcccggcgtgacccacgagctggccagctccctggacctgctgcctaccctggcagccctggctggggccccactgcccaatgtcaccttggatggctttgacctcagccccctgctgctgggcacaggcaagagccctcggcagtctctcttcttctacccgtcctacccagacgaggtccgtggggtttttgctgtgcggactggaaagtacaaggctcacttcttcacccagggctctgcccacagtgataccactgcagaccctgcctgccacgcctccagctctctgactgctcatgagcccccgctgctctatgacctgtccaaggaccctggtgagaactacaacctgctggggggtgtggccggggccaccccagaggtgctgcaagccctgaaacagcttcagctgctcaaggcccagttagacgcagctgtgaccttcggccccagccaggtggcccggggcgaggaccccgccctgcagatctgctgtcatcctggctgcaccccccgcccagcttgctgccattgcccagatccccatgcctgagggcccctcggctggcctgggcatgtgatggctcctcactgggagcctgtgggggaggctcaggtgtctggagggggtttgtgcctgataacgtaataacaccagtggagacttgcagatgtgacaattcgtccaatcctggggtaatgctgtgtgctggtgccggtcccctgtggtacgaatgaggaaactgaggtgcagagaggttcaggacttgtacaagatcacccagccagaaagaggttgggctgggatttgaaccctggtgtcgtggctctggaagctgccctggcgccttggtgatctgcgtgggtcagtgcacacaggcacacgtcagcctcaaggacatgggcacatctgttcacaggagcagcgccacgtgcctttgagtgccaggaacggggtgggagggtgggagggtgtgagggccagaagactcagaagatgcaaagtgcctgagagagacgggatattcccccagaagaagcattcttagagacacaggcactggacctccttggttcttataagaaacctgtctgaagctgggtgatgagttgcacactccaggtggggctaaggggcctggagcccctgctggctcctaggaaggcacagcagcaggccctgagacggctcctctggggcccctccaccctcccaggcctctgcatttcacctgtgcccacacttctgtctcctgccttcaccttttgacccactactaacgattctccacccagcagacaaagtgatctcttaaaaatatctgttggctgggcacggtggctcacgcctgtaatcccagcactttaggaagccgaggcgggtggatcacctgaggtcgggagttcgagaccagcctgaccaacatggagaaaccccatctctactaaaaatacaaaattagccaggtgtagtggtgcatccctgtaatcccagctacttgggagtctgaggctggagaatcacttgaacctgggaggcggtggttgcagtgagccgagatcgcaccattgcactccagcctgggcaacaagagaaaaactctgtctcaaaaaacaaaaaatctgttaggctgcacacggcgattcactcctgtattcccagtgctttgggaggctgaggtgagaggatgcctgaggccaggaattcagaccagcctgggcaacatagtgagaccccagctctaaagatttgtttttgttttttttttttttttttttttttttttttttttttttttgagacggagtctcgctctgtcgcccaggctagagtgcagtggtaccatctccgctcactgcaacctccgcctcccgggttccagggattctcctgcctcagcctccctagtagctggaactacaggtgtgtgctgccatgcccagctaatttttttttatttaatagagacaagatttcaccatgttggccaggctggtctcaaactcctgacctcaggtgatccacccgcctcagcctcccaaagtgctgggattacaggtgtgaaccaccacacctggccaacaatatttgttttaattagccaggcgtggtagcatttgtcctagcaatttgggaggttgaggtgggagaatcacttcagcccactaggtcgaggctgtagtgagctataattgtaccactgcactccagcctcggggacagagtgagaccctgtctgcaaataaacaaataaaacatcaggctgggcttgagcatctattcctgctcaaaatttcgcaggcttctcagaagaaaatccaaaccccttacagtgacccagtttgcccttgaggcctccacccacacccccttccccccagtcttagggggtggcctggctgttcccttcaacggcaacgctctgcctccattgttggcctcctctgcagggagggactgtctgagcacctgcccgtgtctgtgcagcatggcacactgacgtcaggcccacgtgcatgcccaggtggccagtcacacgccaggtgctccctcagtgttggccaagtgagaggagcacaccttccgggcgttcagacacctccccgtggcagacaccgttcgttgctaccaaacagccacctccttcctaatgggctcccatttttcagtgctgggcaaaggtcccttgatcttggagttgcagcctctttctctccaaggagggcggtgaccagcctgagccagtcaatccagtgattggttcaggagtagcctgtgaccaggagtcctggtagtgaacgactggggcagccctgggggtgaggaccttgcgcagccgtcacaggccctgattggacactgggcagctgctaacccagtgtctccagctgcctacctggagagctccaagcgtaagaaaataaaccctgcctgttgaagcca

SEQ ID NO: 858 - DNA, 3993 bp, Homo sapiens
  source 1..3993: mol_type = genomic DNA
gaggcggaagcgcccgcagcccggtaccggctcctcctgggctccctctagcgccttccccccggcccgactccgctggtcagcgccaagtgacttacgcccccgaccctgagcccggaccgctaggcgaggaggatcagatctccgctcgagaatctgaagacccctcggtcccatgtccatgggggcaccgcggtccctcctcctggccctggctgctggcctggccgttgcccgtccgcccaacatcgtgctgatctttgccgacgacctcggctatggggacctgggctgctatgggcaccccagctctaccactcccaacctggaccagctggcggcgggagggctgcggttcacagacttctacgtgcctgtgtctctgtgcacaccctctagggccgccctcctgaccggccggctcccggttcggatgggcatgtaccctggcgtcctggtgcccagctcccgggggggcctgcccctggaggaggtgaccgtggccgaagtcctggctgcccgaggctacctcacaggaatggccggcaagtggcaccttggggtggggcctgagggggccttcctgcccccccatcagggcttccatcgatttctaggcatcccgtactcccacgaccagggcccctgccagaacctgacctgcttcccgccggccactccttgcgacggtggctgtgaccagggcctggtccccatcccactgttggccaacctgtccgtggaggcgcagcccccctggctgcccggactagaggcccgctacatggctttcgcccatgacctcatggccgacgcccagcgccaggatcgccccttcttcctgtactatgcctctcaccacacccactaccctcagttcagtgggcagagctttgcagagcgttcaggccgcgggccatttggggactccctgatggagctggatgcagctgtggggaccctgatgacagccataggggacctggggctgcttgaagagacgctggtcatcttcactgcagacaatggacctgagaccatgcgtatgtcccgaggcggctgctccggtctcttgcggtgtggaaagggaacgacctacgagggcggtgtccgagagcctgccttggccttctggccaggtcatatcgctcccggcgtgacccacgagctggccagctccctggacctgctgcctaccctggcagccctggctggggccccactgcccaatgtcaccttggatggctttgacctcagccccctgctgctgggcacaggcaaggctctgcccacagtgataccactgcagaccctgcctgccacgcctccagctctctgactgctcatgagcccccgctgctctatgacctgtccaaggaccctggtgagaactacaacctgctggggggtgtggccggggccaccccagaggtgctgcaagccctgaaacagcttcagctgctcaaggcccagttagacgcagctgtgaccttcggccccagccaggtggcccggggcgaggaccccgccctgcagatctgctgtcatcctggctgcaccccccgcccagcttgctgccattgcccagatccccatgcctgagggcccctcggctggcctgggcatgtgatggctcctcactgggagcctgtgggggaggctcaggtgtctggagggggtttgtgcctgataacgtaataacaccagtggagacttgcagatgtgacaattcgtccaatcctggggtaatgctgtgtgctggtgccggtcccctgtggtacgaatgaggaaactgaggtgcagagaggttcaggacttgtacaagatcacccagccagaaagaggttgggctgggatttgaaccctggtgtcgtggctctggaagctgccctggcgccttggtgatctgcgtgggtcagtgcacacaggcacacgtcagcctcaaggacatgggcacatctgttcacaggagcagcgccacgtgcctttgagtgccaggaacggggtgggagggtgggagggtgtgagggccagaagactcagaagatgcaaagtgcctgagagagacgggatattcccccagaagaagcattcttagagacacaggcactggacctccttggttcttataagaaacctgtctgaagctgggtgatgagttgcacactccaggtggggctaaggggcctggagcccctgctggctcctaggaaggcacagcagcaggccctgagacggctcctctggggcccctccaccctcccaggcctctgcatttcacctgtgcccacacttctgtctcctgccttcaccttttgacccactactaacgattctccacccagcagacaaagtgatctcttaaaaatatctgttggctgggcacggtggctcacgcctgtaatcccagcactttaggaagccgaggcgggtggatcacctgaggtcgggagttcgagaccagcctgaccaacatggagaaaccccatctctactaaaaatacaaaattagccaggtgtagtggtgcatccctgtaatcccagctacttgggagtctgaggctggagaatcacttgaacctgggaggcggtggttgcagtgagccgagatcgcaccattgcactccagcctgggcaacaagagaaaaactctgtctcaaaaaacaaaaaatctgttaggctgcacacggcgattcactcctgtattcccagtgctttgggaggctgaggtgagaggatgcctgaggccaggaattcagaccagcctgggcaacatagtgagaccccagctctaaagatttgtttttgttttttttttttttttttttttttttttttttttttttttgagacggagtctcgctctgtcgcccaggctagagtgcagtggtaccatctccgctcactgcaacctccgcctcccgggttccagggattctcctgcctcagcctccctagtagctggaactacaggtgtgtgctgccatgcccagctaatttttttttatttaatagagacaagatttcaccatgttggccaggctggtctcaaactcctgacctcaggtgatccacccgcctcagcctcccaaagtgctgggattacaggtgtgaaccaccacacctggccaacaatatttgttttaattagccaggcgtggtagcatttgtcctagcaatttgggaggttgaggtgggagaatcacttcagcccactaggtcgaggctgtagtgagctataattgtaccactgcactccagcctcggggacagagtgagaccctgtctgcaaataaacaaataaaacatcaggctgggcttgagcatctattcctgctcaaaatttcgcaggcttctcagaagaaaatccaaaccccttacagtgacccagtttgcccttgaggcctccacccacacccccttccccccagtcttagggggtggcctggctgttcccttcaacggcaacgctctgcctccattgttggcctcctctgcagggagggactgtctgagcacctgcccgtgtctgtgcagcatggcacactgacgtcaggcccacgtgcatgcccaggtggccagtcacacgccaggtgctccctcagtgttggccaagtgagaggagcacaccttccgggcgttcagacacctccccgtggcagacaccgttcgttgctaccaaacagccacctccttcctaatgggctcccatttttcagtgctgggcaaaggtcccttgatcttggagttgcagcctctttctctccaaggagggcggtgaccagcctgagccagtcaatccagtgattggttcaggagtagcctgtgaccaggagtcctggtagtgaacgactggggcagccctgggggtgaggaccttgcgcagccgtcacaggccctgattggacactgggcagctgctaacccagtgtctccagctgcctacctggagagctccaagcgtaagaaaataaaccctgcctgttgaagcca

SEQ ID NO: 859 - DNA, 4038 bp, Homo sapiens
  source 1..4038: mol_type = genomic DNA
gaggcggaagcgcccgcagcccggtaccggctcctcctgggctccctctagcgccttccccccggcccgactccgctggtcagcgccaagtgacttacgcccccgaccctgagcccggaccgctaggcgaggaggatcagatctccgctcgagaatctgaaggtgccctggtcctggaggagttccgtcccagcccgcggtctcccgacccctcggtcccatgtccatgggggcaccgcggtccctcctcctggccctggctgctggcctggccgttgcccgtccgcccaacatcgtgctgatctttgccgacgacctcggctatggggacctgggctgctatgggcaccccagctctaccactcccaacctggaccagctggcggcgggagggctgcggttcacagacttctacgtgcctgtgtctctgtgcacaccctctagggccgccctcctgaccggccggctcccggttcggatgggcatgtaccctggcgtcctggtgcccagctcccgggggggcctgcccctggaggaggtgaccgtggccgaagtcctggctgcccgaggctacctcacaggaatggccggcaagtggcaccttggggtggggcctgagggggccttcctgcccccccatcagggcttccatcgatttctaggcatcccgtactcccacgaccagggcccctgccagaacctgacctgcttcccgccggccactccttgcgacggtggctgtgaccagggcctggtccccatcccactgttggccaacctgtccgtggaggcgcagcccccctggctgcccggactagaggcccgctacatggctttcgcccatgacctcatggccgacgcccagcgccaggatcgccccttcttcctgtactatgcctctcaccacacccactaccctcagttcagtgggcagagctttgcagagcgttcaggccgcgggccatttggggactccctgatggagctggatgcagctgtggggaccctgatgacagccataggggacctggggctgcttgaagagacgctggtcatcttcactgcagacaatggacctgagaccatgcgtatgtcccgaggcggctgctccggtctcttgcggtgtggaaagggaacgacctacgagggcggtgtccgagagcctgccttggccttctggccaggtcatatcgctcccggcgtgacccacgagctggccagctccctggacctgctgcctaccctggcagccctggctggggccccactgcccaatgtcaccttggatggctttgacctcagccccctgctgctgggcacaggcaaggctctgcccacagtgataccactgcagaccctgcctgccacgcctccagctctctgactgctcatgagcccccgctgctctatgacctgtccaaggaccctggtgagaactacaacctgctggggggtgtggccggggccaccccagaggtgctgcaagccctgaaacagcttcagctgctcaaggcccagttagacgcagctgtgaccttcggccccagccaggtggcccggggcgaggaccccgccctgcagatctgctgtcatcctggctgcaccccccgcccagcttgctgccattgcccagatccccatgcctgagggcccctcggctggcctgggcatgtgatggctcctcactgggagcctgtgggggaggctcaggtgtctggagggggtttgtgcctgataacgtaataacaccagtggagacttgcagatgtgacaattcgtccaatcctggggtaatgctgtgtgctggtgccggtcccctgtggtacgaatgaggaaactgaggtgcagagaggttcaggacttgtacaagatcacccagccagaaagaggttgggctgggatttgaaccctggtgtcgtggctctggaagctgccctggcgccttggtgatctgcgtgggtcagtgcacacaggcacacgtcagcctcaaggacatgggcacatctgttcacaggagcagcgccacgtgcctttgagtgccaggaacggggtgggagggtgggagggtgtgagggccagaagactcagaagatgcaaagtgcctgagagagacgggatattcccccagaagaagcattcttagagacacaggcactggacctccttggttcttataagaaacctgtctgaagctgggtgatgagttgcacactccaggtggggctaaggggcctggagcccctgctggctcctaggaaggcacagcagcaggccctgagacggctcctctggggcccctccaccctcccaggcctctgcatttcacctgtgcccacacttctgtctcctgccttcaccttttgacccactactaacgattctccacccagcagacaaagtgatctcttaaaaatatctgttggctgggcacggtggctcacgcctgtaatcccagcactttaggaagccgaggcgggtggatcacctgaggtcgggagttcgagaccagcctgaccaacatggagaaaccccatctctactaaaaatacaaaattagccaggtgtagtggtgcatccctgtaatcccagctacttgggagtctgaggctggagaatcacttgaacctgggaggcggtggttgcagtgagccgagatcgcaccattgcactccagcctgggcaacaagagaaaaactctgtctcaaaaaacaaaaaatctgttaggctgcacacggcgattcactcctgtattcccagtgctttgggaggctgaggtgagaggatgcctgaggccaggaattcagaccagcctgggcaacatagtgagaccccagctctaaagatttgtttttgttttttttttttttttttttttttttttttttttttttttgagacggagtctcgctctgtcgcccaggctagagtgcagtggtaccatctccgctcactgcaacctccgcctcccgggttccagggattctcctgcctcagcctccctagtagctggaactacaggtgtgtgctgccatgcccagctaatttttttttatttaatagagacaagatttcaccatgttggccaggctggtctcaaactcctgacctcaggtgatccacccgcctcagcctcccaaagtgctgggattacaggtgtgaaccaccacacctggccaacaatatttgttttaattagccaggcgtggtagcatttgtcctagcaatttgggaggttgaggtgggagaatcacttcagcccactaggtcgaggctgtagtgagctataattgtaccactgcactccagcctcggggacagagtgagaccctgtctgcaaataaacaaataaaacatcaggctgggcttgagcatctattcctgctcaaaatttcgcaggcttctcagaagaaaatccaaaccccttacagtgacccagtttgcccttgaggcctccacccacacccccttccccccagtcttagggggtggcctggctgttcccttcaacggcaacgctctgcctccattgttggcctcctctgcagggagggactgtctgagcacctgcccgtgtctgtgcagcatggcacactgacgtcaggcccacgtgcatgcccaggtggccagtcacacgccaggtgctccctcagtgttggccaagtgagaggagcacaccttccgggcgttcagacacctccccgtggcagacaccgttcgttgctaccaaacagccacctccttcctaatgggctcccatttttcagtgctgggcaaaggtcccttgatcttggagttgcagcctctttctctccaaggagggcggtgaccagcctgagccagtcaatccagtgattggttcaggagtagcctgtgaccaggagtcctggtagtgaacgactggggcagccctgggggtgaggaccttgcgcagccgtcacaggccctgattggacactgggcagctgctaacccagtgtctccagctgcctacctggagagctccaagcgtaagaaaataaaccctgcctgttgaagcca

SEQ ID NO: 860 - DNA, 4191 bp, Homo sapiens
  source 1..4191: mol_type = genomic DNA
gaggcggaagcgcccgcagcccggtaccggctcctcctgggctccctctagcgccttccccccggcccgactccgctggtcagcgccaagtgacttacgcccccgaccctgagcccggaccgctaggcgaggaggatcagatctccgctcgagaatctgaaggtgccctggtcctggaggagttccgtcccagcccgcggtctcccggtactgtcgggccccggccctctggagcttcaggaggcggccgtcagggtcggggagtatttgggtccggggtctcagggaagggcggcgcctgggtctgcggtatcggaaagagcctgctggagccaagtagccctccctctcttgggacagacccctcggtcccatgtccatgggggcaccgcggtccctcctcctggccctggctgctggcctggccgttgcccgtccgcccaacatcgtgctgatctttgccgacgacctcggctatggggacctgggctgctatgggcaccccagctctaccactcccaacctggaccagctggcggcgggagggctgcggttcacagacttctacgtgcctgtgtctctgtgcacaccctctagggccgccctcctgaccggccggctcccggttcggatgggcatgtaccctggcgtcctggtgcccagctcccgggggggcctgcccctggaggaggtgaccgtggccgaagtcctggctgcccgaggctacctcacaggaatggccggcaagtggcaccttggggtggggcctgagggggccttcctgcccccccatcagggcttccatcgatttctaggcatcccgtactcccacgaccagggcccctgccagaacctgacctgcttcccgccggccactccttgcgacggtggctgtgaccagggcctggtccccatcccactgttggccaacctgtccgtggaggcgcagcccccctggctgcccggactagaggcccgctacatggctttcgcccatgacctcatggccgacgcccagcgccaggatcgccccttcttcctgtactatgcctctcaccacacccactaccctcagttcagtgggcagagctttgcagagcgttcaggccgcgggccatttggggactccctgatggagctggatgcagctgtggggaccctgatgacagccataggggacctggggctgcttgaagagacgctggtcatcttcactgcagacaatggacctgagaccatgcgtatgtcccgaggcggctgctccggtctcttgcggtgtggaaagggaacgacctacgagggcggtgtccgagagcctgccttggccttctggccaggtcatatcgctcccggcgtgacccacgagctggccagctccctggacctgctgcctaccctggcagccctggctggggccccactgcccaatgtcaccttggatggctttgacctcagccccctgctgctgggcacaggcaaggctctgcccacagtgataccactgcagaccctgcctgccacgcctccagctctctgactgctcatgagcccccgctgctctatgacctgtccaaggaccctggtgagaactacaacctgctggggggtgtggccggggccaccccagaggtgctgcaagccctgaaacagcttcagctgctcaaggcccagttagacgcagctgtgaccttcggccccagccaggtggcccggggcgaggaccccgccctgcagatctgctgtcatcctggctgcaccccccgcccagcttgctgccattgcccagatccccatgcctgagggcccctcggctggcctgggcatgtgatggctcctcactgggagcctgtgggggaggctcaggtgtctggagggggtttgtgcctgataacgtaataacaccagtggagacttgcagatgtgacaattcgtccaatcctggggtaatgctgtgtgctggtgccggtcccctgtggtacgaatgaggaaactgaggtgcagagaggttcaggacttgtacaagatcacccagccagaaagaggttgggctgggatttgaaccctggtgtcgtggctctggaagctgccctggcgccttggtgatctgcgtgggtcagtgcacacaggcacacgtcagcctcaaggacatgggcacatctgttcacaggagcagcgccacgtgcctttgagtgccaggaacggggtgggagggtgggagggtgtgagggccagaagactcagaagatgcaaagtgcctgagagagacgggatattcccccagaagaagcattcttagagacacaggcactggacctccttggttcttataagaaacctgtctgaagctgggtgatgagttgcacactccaggtggggctaaggggcctggagcccctgctggctcctaggaaggcacagcagcaggccctgagacggctcctctggggcccctccaccctcccaggcctctgcatttcacctgtgcccacacttctgtctcctgccttcaccttttgacccactactaacgattctccacccagcagacaaagtgatctcttaaaaatatctgttggctgggcacggtggctcacgcctgtaatcccagcactttaggaagccgaggcgggtggatcacctgaggtcgggagttcgagaccagcctgaccaacatggagaaaccccatctctactaaaaatacaaaattagccaggtgtagtggtgcatccctgtaatcccagctacttgggagtctgaggctggagaatcacttgaacctgggaggcggtggttgcagtgagccgagatcgcaccattgcactccagcctgggcaacaagagaaaaactctgtctcaaaaaacaaaaaatctgttaggctgcacacggcgattcactcctgtattcccagtgctttgggaggctgaggtgagaggatgcctgaggccaggaattcagaccagcctgggcaacatagtgagaccccagctctaaagatttgtttttgttttttttttttttttttttttttttttttttttttttttgagacggagtctcgctctgtcgcccaggctagagtgcagtggtaccatctccgctcactgcaacctccgcctcccgggttccagggattctcctgcctcagcctccctagtagctggaactacaggtgtgtgctgccatgcccagctaatttttttttatttaatagagacaagatttcaccatgttggccaggctggtctcaaactcctgacctcaggtgatccacccgcctcagcctcccaaagtgctgggattacaggtgtgaaccaccacacctggccaacaatatttgttttaattagccaggcgtggtagcatttgtcctagcaatttgggaggttgaggtgggagaatcacttcagcccactaggtcgaggctgtagtgagctataattgtaccactgcactccagcctcggggacagagtgagaccctgtctgcaaataaacaaataaaacatcaggctgggcttgagcatctattcctgctcaaaatttcgcaggcttctcagaagaaaatccaaaccccttacagtgacccagtttgcccttgaggcctccacccacacccccttccccccagtcttagggggtggcctggctgttcccttcaacggcaacgctctgcctccattgttggcctcctctgcagggagggactgtctgagcacctgcccgtgtctgtgcagcatggcacactgacgtcaggcccacgtgcatgcccaggtggccagtcacacgccaggtgctccctcagtgttggccaagtgagaggagcacaccttccgggcgttcagacacctccccgtggcagacaccgttcgttgctaccaaacagccacctccttcctaatgggctcccatttttcagtgctgggcaaaggtcccttgatcttggagttgcagcctctttctctccaaggagggcggtgaccagcctgagccagtcaatccagtgattggttcaggagtagcctgtgaccaggagtcctggtagtgaacgactggggcagccctgggggtgaggaccttgcgcagccgtcacaggccctgattggacactgggcagctgctaacccagtgtctccagctgcctacctggagagctccaagcgtaagaaaataaaccctgcctgttgaagcca

SEQ ID NO: 861 - DNA, 3794 bp, Homo sapiens
  source 1..3794: mol_type = genomic DNA
agtcatgtgacccacacaatggctgagtggctactctcggcttcctggcaacgccgagcgaaagctatgactgcggccgcgggttcggcgggccgcgccgcggtgcccttgctgctgtgtgcgctgctggcgcccggcggcgcgtacgtgctcgacgactccgacgggctgggccgggagttcgacggcatcggcgcggtcagcggcggcggggcaacctcccgacttctagtaaattacccagagccctatcgttctcagatattggattatctctttaagccgaattttggtgcctctttgcatattttaaaagtggaaataggtggtgatgggcagacaacagacggcactgagccctcccacatgcattatgcactagatgagaattatttccgaggatacgagtggtggttgatgaaagaagctaagaagaggaatcccaatattacactcattgggttgccatggtcattccctggatggctgggaaaaggtttcgactggccttatgtcaatcttcagctgactgcctattatgtcgtgacctggattgtgggcgccaagcgttaccatgatttggacattgattatattggaatttggaatgagaggtcatataatgccaattatattaagatattaagaaaaatgctgaattatcaaggtctccagcgagtgaaaatcatagcaagtgataatctctgggagtccatctctgcatccatgctccttgatgccgaactcttcaaggtggttgatgttataggggctcattatcctggaacccattcagcaaaagatgcaaagttgactgggaagaagctttggtcttctgaagactttagcactttaaatagtgacatgggtgcaggctgctggggtcgcattttaaatcagaattatatcaatggctatatgacttccacaatcgcatggaatttagtggctagttactatgaacagttgccttatgggagatgcgggttgatgacggcccaggagccatggagtgggcactacgtggtagaatctcctgtctgggtatcagctcataccactcagtttactcaacctggctggtattacctgaagacagttggccatttagagaaaggaggaagctacgtagctctgactgatggcttagggaacctcaccatcatcattgaaaccatgagtcataaacattctaagtgcatacggccatttcttccttatttcaatgtgtcacaacaatttgccacctttgttcttaagggatcttttagtgaaataccagagctacaggtatggtataccaaacttggaaaaacatccgaaagatttctttttaagcagctggattctctatggctccttgacagcgatggcagtttcacactgagcctgcatgaagatgagctgttcacactcaccactctcaccactggtcgcaaaggcagctacccgcttcctccaaaatcccagcccttcccaagtacctataaggatgatttcaatgttgattacccattttttagtgaagctccaaactttgctgatcaaactggtgtatttgaatattttacaaatattgaagaccctggcgagcatcacttcacgctacgccaagttctcaaccagagacccattacatgggctgccgatgcatccaacacaatcagtattataggagactacaactggaccaatctgactataaagtgtgatgtatacatagagacccctgacacaggaggtgtgttcattgcaggaagagtaaataaaggtggtattttgattagaagtgccagaggaattttcttctggatttttgcaaatggatcttacagggttacaggtgatttagctggatggattatatatgctttaggacgtgttgaagttacagcaaaaaaatggtatacactcacgttaactattaagggtcatttcacctctggcatgctgaatgacaagtctctgtggacagacatccctgtgaattttccaaagaatggctgggctgcaattggaactcactcctttgaatttgcacagtttgacaactttcttgtggaagccacacgctaatacttaacagggcatcatagaatactctggattttcttcccttctttttggttttggttcagagccaattcttgtttcattggaacagtatatgaggcttttgagactaaaaataatgaagagtaaaaggggagagaaatttatttttaatttaccctgtggaagattttattagaattaattccaaggggaaaactggtgaatctttaacattacctggtgtgttccctaacattcaaactgtgcattggccatacccttaggagtggtttgagtagtacagacctcgaagccttgctgctaacactgaggtagctctcttcatcttatttgcaagcggtcctgtagatggcagtaacttgatcatcactgagatgtatttatgcatgctgaccgtgtgtccaagtgagccagtgtcttcatcacaagatgatgctgccataatagaaagctgaagaacactagaagtagctttttgaaaaccacttcaacctgttatgctttatgctctaaaaagtatttttttattttcctttttaagatgatacttttgaaatgcaggatatgatgagtgggatgattttaaaaatgcctctttaataaactacctctaacactatttctgcagtaatagatattagcagattaattgggttatttgcattatttaatttttttgattccaagttttggtcttgtaaccactataactctctgtgaacgtttttccaggtggctggaagaaggaagaaaacctgatatagccaatgctgttgtagtcgtttcctcagcctcatctcactgtgctgtggtctgtcctcacatgtgcactggtaacagactcacacagctgatgaatgcttttctctccttatgtgtggaaggaggggagcacttagacatttgctaactcccagaattggatcatctcctaagatgtacttactttttaaagtccaaatatgtttatatttaaatatacgtgagcgtgttcatcatgttgtatgatttatactaagcattaatgtggctctatgtagcaaatcagttattcatgtaggtaaagtaaatctagaattatttataagaattactcattgaactaattctactatttaggaatttgtaagagtctaacataggcttagctacagtgaagttttgcattgcttttgaagacaagaagataagtgctagaataaataagattacagagaaaattttttgttaaaaccaagtgatttccagctgatgtatctaatattttttaaaacgaacattatagaggtgtaatttatttacaataaaatgttcctactttaaatatacaattcagtgagttttgataaattgatatacccatgtaaccaacactccagtcaagcttcagaatatttccatcaccccagaaggttctcttgtatacctgctcagtcagttcctttcactcccaattgttggcagccattgataggaattctatcactataggttagttttctttgttccagaacatcatgaaagcggcgtcatgtactgtgtattcttatgaatggtttctttccatcagcataatgatttgagatttgtccatgttgtgtgattcagtggtttgttccttcttatttctgaagagttttccattgtatgaatataccacaatttgtttcctccccaccagtttctgatactacaattaaaactgtctacatttacaa

SEQ ID NO: 862 - DNA, 3725 bp, Homo sapiens
  source 1..3725: mol_type = genomic DNA
agtcatgtgacccacacaatggctgagtggctactctcggcttcctggcaacgccgagcgaaagctatgactgcggccgcgggttcggcgggccgcgccgcggtgcccttgctgctgtgtgcgctgctggcgcccggcggcgcgtacgtgctcgacgactccgacgggctgggccgggagttcgacggcatcggcgcggtcagcggcggcgggccgaattttggtgcctctttgcatattttaaaagtggaaataggtggtgatgggcagacaacagacggcactgagccctcccacatgcattatgcactagatgagaattatttccgaggatacgagtggtggttgatgaaagaagctaagaagaggaatcccaatattacactcattgggttgccatggtcattccctggatggctgggaaaaggtttcgactggccttatgtcaatcttcagctgactgcctattatgtcgtgacctggattgtgggcgccaagcgttaccatgatttggacattgattatattggaatttggaatgagaggtcatataatgccaattatattaagatattaagaaaaatgctgaattatcaaggtctccagcgagtgaaaatcatagcaagtgataatctctgggagtccatctctgcatccatgctccttgatgccgaactcttcaaggtggttgatgttataggggctcattatcctggaacccattcagcaaaagatgcaaagttgactgggaagaagctttggtcttctgaagactttagcactttaaatagtgacatgggtgcaggctgctggggtcgcattttaaatcagaattatatcaatggctatatgacttccacaatcgcatggaatttagtggctagttactatgaacagttgccttatgggagatgcgggttgatgacggcccaggagccatggagtgggcactacgtggtagaatctcctgtctgggtatcagctcataccactcagtttactcaacctggctggtattacctgaagacagttggccatttagagaaaggaggaagctacgtagctctgactgatggcttagggaacctcaccatcatcattgaaaccatgagtcataaacattctaagtgcatacggccatttcttccttatttcaatgtgtcacaacaatttgccacctttgttcttaagggatcttttagtgaaataccagagctacaggtatggtataccaaacttggaaaaacatccgaaagatttctttttaagcagctggattctctatggctccttgacagcgatggcagtttcacactgagcctgcatgaagatgagctgttcacactcaccactctcaccactggtcgcaaaggcagctacccgcttcctccaaaatcccagcccttcccaagtacctataaggatgatttcaatgttgattacccattttttagtgaagctccaaactttgctgatcaaactggtgtatttgaatattttacaaatattgaagaccctggcgagcatcacttcacgctacgccaagttctcaaccagagacccattacatgggctgccgatgcatccaacacaatcagtattataggagactacaactggaccaatctgactataaagtgtgatgtatacatagagacccctgacacaggaggtgtgttcattgcaggaagagtaaataaaggtggtattttgattagaagtgccagaggaattttcttctggatttttgcaaatggatcttacagggttacaggtgatttagctggatggattatatatgctttaggacgtgttgaagttacagcaaaaaaatggtatacactcacgttaactattaagggtcatttcacctctggcatgctgaatgacaagtctctgtggacagacatccctgtgaattttccaaagaatggctgggctgcaattggaactcactcctttgaatttgcacagtttgacaactttcttgtggaagccacacgctaatacttaacagggcatcatagaatactctggattttcttcccttctttttggttttggttcagagccaattcttgtttcattggaacagtatatgaggcttttgagactaaaaataatgaagagtaaaaggggagagaaatttatttttaatttaccctgtggaagattttattagaattaattccaaggggaaaactggtgaatctttaacattacctggtgtgttccctaacattcaaactgtgcattggccatacccttaggagtggtttgagtagtacagacctcgaagccttgctgctaacactgaggtagctctcttcatcttatttgcaagcggtcctgtagatggcagtaacttgatcatcactgagatgtatttatgcatgctgaccgtgtgtccaagtgagccagtgtcttcatcacaagatgatgctgccataatagaaagctgaagaacactagaagtagctttttgaaaaccacttcaacctgttatgctttatgctctaaaaagtatttttttattttcctttttaagatgatacttttgaaatgcaggatatgatgagtgggatgattttaaaaatgcctctttaataaactacctctaacactatttctgcagtaatagatattagcagattaattgggttatttgcattatttaatttttttgattccaagttttggtcttgtaaccactataactctctgtgaacgtttttccaggtggctggaagaaggaagaaaacctgatatagccaatgctgttgtagtcgtttcctcagcctcatctcactgtgctgtggtctgtcctcacatgtgcactggtaacagactcacacagctgatgaatgcttttctctccttatgtgtggaaggaggggagcacttagacatttgctaactcccagaattggatcatctcctaagatgtacttactttttaaagtccaaatatgtttatatttaaatatacgtgagcgtgttcatcatgttgtatgatttatactaagcattaatgtggctctatgtagcaaatcagttattcatgtaggtaaagtaaatctagaattatttataagaattactcattgaactaattctactatttaggaatttgtaagagtctaacataggcttagctacagtgaagttttgcattgcttttgaagacaagaagataagtgctagaataaataagattacagagaaaattttttgttaaaaccaagtgatttccagctgatgtatctaatattttttaaaacgaacattatagaggtgtaatttatttacaataaaatgttcctactttaaatatacaattcagtgagttttgataaattgatatacccatgtaaccaacactccagtcaagcttcagaatatttccatcaccccagaaggttctcttgtatacctgctcagtcagttcctttcactcccaattgttggcagccattgataggaattctatcactataggttagttttctttgttccagaacatcatgaaagcggcgtcatgtactgtgtattcttatgaatggtttctttccatcagcataatgatttgagatttgtccatgttgtgtgattcagtggtttgttccttcttatttctgaagagttttccattgtatgaatataccacaatttgtttcctccccaccagtttctgatactacaattaaaactgtctacatttacaa

SEQ ID NO: 863 - DNA, 3864 bp, Homo sapiens
  source 1..3864: mol_type = genomic DNA
gtgcttattaacttttctctcagtccctcactctgctgctcttctcgcctcatctcacataagggaaaactcaggctccaaaagcaaagtgattccaccaagatgacaatggaatcgggacctggtgtccaagcctggtcctcgcacgaggtagatactccctgagatgctggggaagagccatggtagggccactcatggccctcttcctttggcggaccttggaatccaccttccctgcgttaaagtgctccaccaggtgacgccggaagagaagccagcagcaacctcccgacttctagtaaattacccagagccctatcgttctcagatattggattatctctttaagccgaattttggtgcctctttgcatattttaaaagtggaaataggtggtgatgggcagacaacagacggcactgagccctcccacatgcattatgcactagatgagaattatttccgaggatacgagtggtggttgatgaaagaagctaagaagaggaatcccaatattacactcattgggttgccatggtcattccctggatggctgggaaaaggtttcgactggccttatgtcaatcttcagctgactgcctattatgtcgtgacctggattgtgggcgccaagcgttaccatgatttggacattgattatattggaatttggaatgagaggtcatataatgccaattatattaagatattaagaaaaatgctgaattatcaaggtctccagcgagtgaaaatcatagcaagtgataatctctgggagtccatctctgcatccatgctccttgatgccgaactcttcaaggtggttgatgttataggggctcattatcctggaacccattcagcaaaagatgcaaagttgactgggaagaagctttggtcttctgaagactttagcactttaaatagtgacatgggtgcaggctgctggggtcgcattttaaatcagaattatatcaatggctatatgacttccacaatcgcatggaatttagtggctagttactatgaacagttgccttatgggagatgcgggttgatgacggcccaggagccatggagtgggcactacgtggtagaatctcctgtctgggtatcagctcataccactcagtttactcaacctggctggtattacctgaagacagttggccatttagagaaaggaggaagctacgtagctctgactgatggcttagggaacctcaccatcatcattgaaaccatgagtcataaacattctaagtgcatacggccatttcttccttatttcaatgtgtcacaacaatttgccacctttgttcttaagggatcttttagtgaaataccagagctacaggtatggtataccaaacttggaaaaacatccgaaagatttctttttaagcagctggattctctatggctccttgacagcgatggcagtttcacactgagcctgcatgaagatgagctgttcacactcaccactctcaccactggtcgcaaaggcagctacccgcttcctccaaaatcccagcccttcccaagtacctataaggatgatttcaatgttgattacccattttttagtgaagctccaaactttgctgatcaaactggtgtatttgaatattttacaaatattgaagaccctggcgagcatcacttcacgctacgccaagttctcaaccagagacccattacatgggctgccgatgcatccaacacaatcagtattataggagactacaactggaccaatctgactataaagtgtgatgtatacatagagacccctgacacaggaggtgtgttcattgcaggaagagtaaataaaggtggtattttgattagaagtgccagaggaattttcttctggatttttgcaaatggatcttacagggttacaggtgatttagctggatggattatatatgctttaggacgtgttgaagttacagcaaaaaaatggtatacactcacgttaactattaagggtcatttcacctctggcatgctgaatgacaagtctctgtggacagacatccctgtgaattttccaaagaatggctgggctgcaattggaactcactcctttgaatttgcacagtttgacaactttcttgtggaagccacacgctaatacttaacagggcatcatagaatactctggattttcttcccttctttttggttttggttcagagccaattcttgtttcattggaacagtatatgaggcttttgagactaaaaataatgaagagtaaaaggggagagaaatttatttttaatttaccctgtggaagattttattagaattaattccaaggggaaaactggtgaatctttaacattacctggtgtgttccctaacattcaaactgtgcattggccatacccttaggagtggtttgagtagtacagacctcgaagccttgctgctaacactgaggtagctctcttcatcttatttgcaagcggtcctgtagatggcagtaacttgatcatcactgagatgtatttatgcatgctgaccgtgtgtccaagtgagccagtgtcttcatcacaagatgatgctgccataatagaaagctgaagaacactagaagtagctttttgaaaaccacttcaacctgttatgctttatgctctaaaaagtatttttttattttcctttttaagatgatacttttgaaatgcaggatatgatgagtgggatgattttaaaaatgcctctttaataaactacctctaacactatttctgcagtaatagatattagcagattaattgggttatttgcattatttaatttttttgattccaagttttggtcttgtaaccactataactctctgtgaacgtttttccaggtggctggaagaaggaagaaaacctgatatagccaatgctgttgtagtcgtttcctcagcctcatctcactgtgctgtggtctgtcctcacatgtgcactggtaacagactcacacagctgatgaatgcttttctctccttatgtgtggaaggaggggagcacttagacatttgctaactcccagaattggatcatctcctaagatgtacttactttttaaagtccaaatatgtttatatttaaatatacgtgagcgtgttcatcatgttgtatgatttatactaagcattaatgtggctctatgtagcaaatcagttattcatgtaggtaaagtaaatctagaattatttataagaattactcattgaactaattctactatttaggaatttgtaagagtctaacataggcttagctacagtgaagttttgcattgcttttgaagacaagaagataagtgctagaataaataagattacagagaaaattttttgttaaaaccaagtgatttccagctgatgtatctaatattttttaaaacgaacattatagaggtgtaatttatttacaataaaatgttcctactttaaatatacaattcagtgagttttgataaattgatatacccatgtaaccaacactccagtcaagcttcagaatatttccatcaccccagaaggttctcttgtatacctgctcagtcagttcctttcactcccaattgttggcagccattgataggaattctatcactataggttagttttctttgttccagaacatcatgaaagcggcgtcatgtactgtgtattcttatgaatggtttctttccatcagcataatgatttgagatttgtccatgttgtgtgattcagtggtttgttccttcttatttctgaagagttttccattgtatgaatataccacaatttgtttcctccccaccagtttctgatactacaattaaaactgtctacatttacaa

SEQ ID NO: 864 - DNA, 4132 bp, Homo sapiens
  source 1..4132: mol_type = genomic DNA
attcccctagggtgccagtcagcaggcggttggggcgggcccgctgcggggctggggcgggtgctttctcgtttaacacgaaccagacaggcagttaggtttgaacaaatgaggatccggaggtccagagagtataggtgcagagagtaaagtgacaggtctaagtagtgaagtagccggggctggaaccctcgtcccaggcagtggggcacaggctgtcttcatcgcggagatggcagtcggggagcgtcgctccagaaagggccagggagtgcgggagcgtccgtgtgcgaaagagaacgccccagtgggatgctttggctgtgtctctcccttttggaggagttggtgggtggtggagtcgttaagtcccgtgcagttgttagtgcagggtaagaatgggctcctccagagagggtagcgccgaataggatttcgtttggaggcaggactggtgcctcaaggtctctttaaaaggaagataagcgagcggcctgaaactaccgggtactccctctgggcccatgggcttcatggtggccgacctttgggcaacctcccgacttctagtaaattacccagagccctatcgttctcagatattggattatctctttaagccgaattttggtgcctctttgcatattttaaaagtggaaataggtggtgatgggcagacaacagacggcactgagccctcccacatgcattatgcactagatgagaattatttccgaggatacgagtggtggttgatgaaagaagctaagaagaggaatcccaatattacactcattgggttgccatggtcattccctggatggctgggaaaaggtttcgactggccttatgtcaatcttcagctgactgcctattatgtcgtgacctggattgtgggcgccaagcgttaccatgatttggacattgattatattggaatttggaatgagaggtcatataatgccaattatattaagatattaagaaaaatgctgaattatcaaggtctccagcgagtgaaaatcatagcaagtgataatctctgggagtccatctctgcatccatgctccttgatgccgaactcttcaaggtggttgatgttataggggctcattatcctggaacccattcagcaaaagatgcaaagttgactgggaagaagctttggtcttctgaagactttagcactttaaatagtgacatgggtgcaggctgctggggtcgcattttaaatcagaattatatcaatggctatatgacttccacaatcgcatggaatttagtggctagttactatgaacagttgccttatgggagatgcgggttgatgacggcccaggagccatggagtgggcactacgtggtagaatctcctgtctgggtatcagctcataccactcagtttactcaacctggctggtattacctgaagacagttggccatttagagaaaggaggaagctacgtagctctgactgatggcttagggaacctcaccatcatcattgaaaccatgagtcataaacattctaagtgcatacggccatttcttccttatttcaatgtgtcacaacaatttgccacctttgttcttaagggatcttttagtgaaataccagagctacaggtatggtataccaaacttggaaaaacatccgaaagatttctttttaagcagctggattctctatggctccttgacagcgatggcagtttcacactgagcctgcatgaagatgagctgttcacactcaccactctcaccactggtcgcaaaggcagctacccgcttcctccaaaatcccagcccttcccaagtacctataaggatgatttcaatgttgattacccattttttagtgaagctccaaactttgctgatcaaactggtgtatttgaatattttacaaatattgaagaccctggcgagcatcacttcacgctacgccaagttctcaaccagagacccattacatgggctgccgatgcatccaacacaatcagtattataggagactacaactggaccaatctgactataaagtgtgatgtatacatagagacccctgacacaggaggtgtgttcattgcaggaagagtaaataaaggtggtattttgattagaagtgccagaggaattttcttctggatttttgcaaatggatcttacagggttacaggtgatttagctggatggattatatatgctttaggacgtgttgaagttacagcaaaaaaatggtatacactcacgttaactattaagggtcatttcacctctggcatgctgaatgacaagtctctgtggacagacatccctgtgaattttccaaagaatggctgggctgcaattggaactcactcctttgaatttgcacagtttgacaactttcttgtggaagccacacgctaatacttaacagggcatcatagaatactctggattttcttcccttctttttggttttggttcagagccaattcttgtttcattggaacagtatatgaggcttttgagactaaaaataatgaagagtaaaaggggagagaaatttatttttaatttaccctgtggaagattttattagaattaattccaaggggaaaactggtgaatctttaacattacctggtgtgttccctaacattcaaactgtgcattggccatacccttaggagtggtttgagtagtacagacctcgaagccttgctgctaacactgaggtagctctcttcatcttatttgcaagcggtcctgtagatggcagtaacttgatcatcactgagatgtatttatgcatgctgaccgtgtgtccaagtgagccagtgtcttcatcacaagatgatgctgccataatagaaagctgaagaacactagaagtagctttttgaaaaccacttcaacctgttatgctttatgctctaaaaagtatttttttattttcctttttaagatgatacttttgaaatgcaggatatgatgagtgggatgattttaaaaatgcctctttaataaactacctctaacactatttctgcagtaatagatattagcagattaattgggttatttgcattatttaatttttttgattccaagttttggtcttgtaaccactataactctctgtgaacgtttttccaggtggctggaagaaggaagaaaacctgatatagccaatgctgttgtagtcgtttcctcagcctcatctcactgtgctgtggtctgtcctcacatgtgcactggtaacagactcacacagctgatgaatgcttttctctccttatgtgtggaaggaggggagcacttagacatttgctaactcccagaattggatcatctcctaagatgtacttactttttaaagtccaaatatgtttatatttaaatatacgtgagcgtgttcatcatgttgtatgatttatactaagcattaatgtggctctatgtagcaaatcagttattcatgtaggtaaagtaaatctagaattatttataagaattactcattgaactaattctactatttaggaatttgtaagagtctaacataggcttagctacagtgaagttttgcattgcttttgaagacaagaagataagtgctagaataaataagattacagagaaaattttttgttaaaaccaagtgatttccagctgatgtatctaatattttttaaaacgaacattatagaggtgtaatttatttacaataaaatgttcctactttaaatatacaattcagtgagttttgataaattgatatacccatgtaaccaacactccagtcaagcttcagaatatttccatcaccccagaaggttctcttgtatacctgctcagtcagttcctttcactcccaattgttggcagccattgataggaattctatcactataggttagttttctttgttccagaacatcatgaaagcggcgtcatgtactgtgtattcttatgaatggtttctttccatcagcataatgatttgagatttgtccatgttgtgtgattcagtggtttgttccttcttatttctgaagagttttccattgtatgaatataccacaatttgtttcctccccaccagtttctgatactacaattaaaactgtctacatttacaa

SEQ ID NO: 865 - DNA, 4738 bp, Homo sapiens
  source 1..4738: mol_type = genomic DNA
taatgtttcttgaaaatgttaaggttgaactcggatttttggggttgagttggatggagcttgcatccttacattcaactcagaacaagcttgaatgcctgctgcaaggatgacctggtctgtagtgtgaccacaagatataaccttctgctaggggaaatttttttccccctggagttagctgatcctttttgatttttatgttttcattccctaatttgcaatctctccagccgtgctgatgtgtatttcaggggaaacctgtgggccgatgagttaatgcatttattctttgctactactattctcctttttatgtttttgggctaaacctgaaacagccaatatttcatggagtgaggccccatcttttttatagctttacttgtgatactatatctagggtaagagcttaccgaaaaatggaagtctttgtttccattaggtttattaagcccagtttaaaattactaagatgagaagaatcatttcgtaattcaaagtaggaaactcctacctaatctgatagaatatacaattattagtatccctatatagttcattactcctcataggaactcactaaataatgaaaattcttgcaacattatatttgcataccactttaaacttctttgtggagtccttggttcctagcccaggttgtgccagtaagtgtttagagtgctgtcatttaatcttcatgtcagagagggaaagcggtatggtacagtaagtagttaagaatgtagggccgggcacggtggctcacgcctgtaatcccagcacttcgggcttccgaggcgggcggatcacgaggtcaggagatcaagactatcctggctaacacggtgaaaccccgtctctactaaaaatacaaaaaattagccagtcttggtagcacgcgcctgtagtcccagctactcgggaggctgaggcaggagaatcgcttgaacccgggaggcggaggttgcagtgagccgggatcacaccactgcactccagcctgggcgacagagtgagactccgttcaaaacacaaacaaacaaaaaaacccaaaaaccaaaccaaagcgaaacaaaacaaaaagaatgtagactaaagagaagattgccaagagtgtcttctgggttctgccacttcactgtgtggccttggcaacctcccgacttctagtaaattacccagagccctatcgttctcagatattggattatctctttaagccgaattttggtgcctctttgcatattttaaaagtggaaataggtggtgatgggcagacaacagacggcactgagccctcccacatgcattatgcactagatgagaattatttccgaggatacgagtggtggttgatgaaagaagctaagaagaggaatcccaatattacactcattgggttgccatggtcattccctggatggctgggaaaaggtttcgactggccttatgtcaatcttcagctgactgcctattatgtcgtgacctggattgtgggcgccaagcgttaccatgatttggacattgattatattggaatttggaatgagaggtcatataatgccaattatattaagatattaagaaaaatgctgaattatcaaggtctccagcgagtgaaaatcatagcaagtgataatctctgggagtccatctctgcatccatgctccttgatgccgaactcttcaaggtggttgatgttataggggctcattatcctggaacccattcagcaaaagatgcaaagttgactgggaagaagctttggtcttctgaagactttagcactttaaatagtgacatgggtgcaggctgctggggtcgcattttaaatcagaattatatcaatggctatatgacttccacaatcgcatggaatttagtggctagttactatgaacagttgccttatgggagatgcgggttgatgacggcccaggagccatggagtgggcactacgtggtagaatctcctgtctgggtatcagctcataccactcagtttactcaacctggctggtattacctgaagacagttggccatttagagaaaggaggaagctacgtagctctgactgatggcttagggaacctcaccatcatcattgaaaccatgagtcataaacattctaagtgcatacggccatttcttccttatttcaatgtgtcacaacaatttgccacctttgttcttaagggatcttttagtgaaataccagagctacaggtatggtataccaaacttggaaaaacatccgaaagatttctttttaagcagctggattctctatggctccttgacagcgatggcagtttcacactgagcctgcatgaagatgagctgttcacactcaccactctcaccactggtcgcaaaggcagctacccgcttcctccaaaatcccagcccttcccaagtacctataaggatgatttcaatgttgattacccattttttagtgaagctccaaactttgctgatcaaactggtgtatttgaatattttacaaatattgaagaccctggcgagcatcacttcacgctacgccaagttctcaaccagagacccattacatgggctgccgatgcatccaacacaatcagtattataggagactacaactggaccaatctgactataaagtgtgatgtatacatagagacccctgacacaggaggtgtgttcattgcaggaagagtaaataaaggtggtattttgattagaagtgccagaggaattttcttctggatttttgcaaatggatcttacagggttacaggtgatttagctggatggattatatatgctttaggacgtgttgaagttacagcaaaaaaatggtatacactcacgttaactattaagggtcatttcacctctggcatgctgaatgacaagtctctgtggacagacatccctgtgaattttccaaagaatggctgggctgcaattggaactcactcctttgaatttgcacagtttgacaactttcttgtggaagccacacgctaatacttaacagggcatcatagaatactctggattttcttcccttctttttggttttggttcagagccaattcttgtttcattggaacagtatatgaggcttttgagactaaaaataatgaagagtaaaaggggagagaaatttatttttaatttaccctgtggaagattttattagaattaattccaaggggaaaactggtgaatctttaacattacctggtgtgttccctaacattcaaactgtgcattggccatacccttaggagtggtttgagtagtacagacctcgaagccttgctgctaacactgaggtagctctcttcatcttatttgcaagcggtcctgtagatggcagtaacttgatcatcactgagatgtatttatgcatgctgaccgtgtgtccaagtgagccagtgtcttcatcacaagatgatgctgccataatagaaagctgaagaacactagaagtagctttttgaaaaccacttcaacctgttatgctttatgctctaaaaagtatttttttattttcctttttaagatgatacttttgaaatgcaggatatgatgagtgggatgattttaaaaatgcctctttaataaactacctctaacactatttctgcagtaatagatattagcagattaattgggttatttgcattatttaatttttttgattccaagttttggtcttgtaaccactataactctctgtgaacgtttttccaggtggctggaagaaggaagaaaacctgatatagccaatgctgttgtagtcgtttcctcagcctcatctcactgtgctgtggtctgtcctcacatgtgcactggtaacagactcacacagctgatgaatgcttttctctccttatgtgtggaaggaggggagcacttagacatttgctaactcccagaattggatcatctcctaagatgtacttactttttaaagtccaaatatgtttatatttaaatatacgtgagcgtgttcatcatgttgtatgatttatactaagcattaatgtggctctatgtagcaaatcagttattcatgtaggtaaagtaaatctagaattatttataagaattactcattgaactaattctactatttaggaatttgtaagagtctaacataggcttagctacagtgaagttttgcattgcttttgaagacaagaagataagtgctagaataaataagattacagagaaaattttttgttaaaaccaagtgatttccagctgatgtatctaatattttttaaaacgaacattatagaggtgtaatttatttacaataaaatgttcctactttaaatatacaattcagtgagttttgataaattgatatacccatgtaaccaacactccagtcaagcttcagaatatttccatcaccccagaaggttctcttgtatacctgctcagtcagttcctttcactcccaattgttggcagccattgataggaattctatcactataggttagttttctttgttccagaacatcatgaaagcggcgtcatgtactgtgtattcttatgaatggtttctttccatcagcataatgatttgagatttgtccatgttgtgtgattcagtggtttgttccttcttatttctgaagagttttccattgtatgaatataccacaatttgtttcctccccaccagtttctgatactacaattaaaactgtctacatttacaa

SEQ ID NO: 866 - DNA, 3552 bp, Homo sapiens
  source 1..3552: mol_type = genomic DNA
ctcttcctatatcaagacatattataggctaaaggtgtgggttctgagaacagggctcacgagtccagggattcatatccagcgttgaaaagctgaaagttgagacggcactgagccctcccacatgcattatgcactagatgagaattatttccgaggatacgagtggtggttgatgaaagaagctaagaagaggaatcccaatattacactcattgggttgccatggtcattccctggatggctgggaaaaggtttcgactggccttatgtcaatcttcagctgactgcctattatgtcgtgacctggattgtgggcgccaagcgttaccatgatttggacattgattatattggaatttggaatgagaggtcatataatgccaattatattaagatattaagaaaaatgctgaattatcaaggtctccagcgagtgaaaatcatagcaagtgataatctctgggagtccatctctgcatccatgctccttgatgccgaactcttcaaggtggttgatgttataggggctcattatcctggaacccattcagcaaaagatgcaaagttgactgggaagaagctttggtcttctgaagactttagcactttaaatagtgacatgggtgcaggctgctggggtcgcattttaaatcagaattatatcaatggctatatgacttccacaatcgcatggaatttagtggctagttactatgaacagttgccttatgggagatgcgggttgatgacggcccaggagccatggagtgggcactacgtggtagaatctcctgtctgggtatcagctcataccactcagtttactcaacctggctggtattacctgaagacagttggccatttagagaaaggaggaagctacgtagctctgactgatggcttagggaacctcaccatcatcattgaaaccatgagtcataaacattctaagtgcatacggccatttcttccttatttcaatgtgtcacaacaatttgccacctttgttcttaagggatcttttagtgaaataccagagctacaggtatggtataccaaacttggaaaaacatccgaaagatttctttttaagcagctggattctctatggctccttgacagcgatggcagtttcacactgagcctgcatgaagatgagctgttcacactcaccactctcaccactggtcgcaaaggcagctacccgcttcctccaaaatcccagcccttcccaagtacctataaggatgatttcaatgttgattacccattttttagtgaagctccaaactttgctgatcaaactggtgtatttgaatattttacaaatattgaagaccctggcgagcatcacttcacgctacgccaagttctcaaccagagacccattacatgggctgccgatgcatccaacacaatcagtattataggagactacaactggaccaatctgactataaagtgtgatgtatacatagagacccctgacacaggaggtgtgttcattgcaggaagagtaaataaaggtggtattttgattagaagtgccagaggaattttcttctggatttttgcaaatggatcttacagggttacaggtgatttagctggatggattatatatgctttaggacgtgttgaagttacagcaaaaaaatggtatacactcacgttaactattaagggtcatttcacctctggcatgctgaatgacaagtctctgtggacagacatccctgtgaattttccaaagaatggctgggctgcaattggaactcactcctttgaatttgcacagtttgacaactttcttgtggaagccacacgctaatacttaacagggcatcatagaatactctggattttcttcccttctttttggttttggttcagagccaattcttgtttcattggaacagtatatgaggcttttgagactaaaaataatgaagagtaaaaggggagagaaatttatttttaatttaccctgtggaagattttattagaattaattccaaggggaaaactggtgaatctttaacattacctggtgtgttccctaacattcaaactgtgcattggccatacccttaggagtggtttgagtagtacagacctcgaagccttgctgctaacactgaggtagctctcttcatcttatttgcaagcggtcctgtagatggcagtaacttgatcatcactgagatgtatttatgcatgctgaccgtgtgtccaagtgagccagtgtcttcatcacaagatgatgctgccataatagaaagctgaagaacactagaagtagctttttgaaaaccacttcaacctgttatgctttatgctctaaaaagtatttttttattttcctttttaagatgatacttttgaaatgcaggatatgatgagtgggatgattttaaaaatgcctctttaataaactacctctaacactatttctgcagtaatagatattagcagattaattgggttatttgcattatttaatttttttgattccaagttttggtcttgtaaccactataactctctgtgaacgtttttccaggtggctggaagaaggaagaaaacctgatatagccaatgctgttgtagtcgtttcctcagcctcatctcactgtgctgtggtctgtcctcacatgtgcactggtaacagactcacacagctgatgaatgcttttctctccttatgtgtggaaggaggggagcacttagacatttgctaactcccagaattggatcatctcctaagatgtacttactttttaaagtccaaatatgtttatatttaaatatacgtgagcgtgttcatcatgttgtatgatttatactaagcattaatgtggctctatgtagcaaatcagttattcatgtaggtaaagtaaatctagaattatttataagaattactcattgaactaattctactatttaggaatttgtaagagtctaacataggcttagctacagtgaagttttgcattgcttttgaagacaagaagataagtgctagaataaataagattacagagaaaattttttgttaaaaccaagtgatttccagctgatgtatctaatattttttaaaacgaacattatagaggtgtaatttatttacaataaaatgttcctactttaaatatacaattcagtgagttttgataaattgatatacccatgtaaccaacactccagtcaagcttcagaatatttccatcaccccagaaggttctcttgtatacctgctcagtcagttcctttcactcccaattgttggcagccattgataggaattctatcactataggttagttttctttgttccagaacatcatgaaagcggcgtcatgtactgtgtattcttatgaatggtttctttccatcagcataatgatttgagatttgtccatgttgtgtgattcagtggtttgttccttcttatttctgaagagttttccattgtatgaatataccacaatttgtttcctccccaccagtttctgatactacaattaaaactgtctacatttacaa

SEQ ID NO: 867 - DNA, 4785 bp, Homo sapiens
  source 1..4785: mol_type = genomic DNA
ctcacgtggccagccccctccgagaggggagaccagcgggccatgacaagctccaggctttggttttcgctgctgctggcggcagcgttcgcaggacgggcgacggccctctggccctggcctcagaacttccaaacctccgaccagcgctacgtcctttacccgaacaactttcaattccagtacgatgtcagctcggccgcgcagcccggctgctcagtcctcgacgaggccttccagcgctatcgtgacctgcttttcggttccgggtcttggccccgtccttacctcacagggaaacggcatacactggagaagaatgtgttggttgtctctgtagtcacacctggatgtaaccagcttcctactttggagtcagtggagaattataccctgaccataaatgatgaccagtgtttactcctctctgagactgtctggggagctctccgaggtctggagacttttagccagcttgtttggaaatctgctgagggcacattctttatcaacaagactgagattgaggactttccccgctttcctcaccggggcttgctgttggatacatctcgccattacctgccactctctagcatcctggacactctggatgtcatggcgtacaataaattgaacgtgttccactggcatctggtagatgatccttccttcccatatgagagcttcacttttccagagctcatgagaaaggggtcctacaaccctgtcacccacatctacacagcacaggatgtgaaggaggtcattgaatacgcacggctccggggtatccgtgtgcttgcagagtttgacactcctggccacactttgtcctggggaccaggtatccctggattactgactccttgctactctgggtctgagccctctggcacctttggaccagtgaatcccagtctcaataatacctatgagttcatgagcacattcttcttagaagtcagctctgtcttcccagatttttatcttcatcttggaggagatgaggttgatttcacctgctggaagtccaacccagagatccaggactttatgaggaagaaaggcttcggtgaggacttcaagcagctggagtccttctacatccagacgctgctggacatcgtctcttcttatggcaagggctatgtggtgtggcaggaggtgtttgataataaagtaaagattcagccagacacaatcatacaggtgtggcgagaggatattccagtgaactatatgaaggagctggaactggtcaccaaggccggcttccgggcccttctctctgccccctggtacctgaaccgtatatcctatggccctgactggaaggatttctacatagtggaacccctggcatttgaaggtacccctgagcagaaggctctggtgattggtggagaggcttgtatgtggggagaatatgtggacaacacaaacctggtccccaggctctggcccagagcaggggctgttgccgaaaggctgtggagcaacaagttgacatctgacctgacatttgcctatgaacgtttgtcacacttccgctgtgaattgctgaggcgaggtgtccaggcccaacccctcaatgtaggcttctgtgagcaggagtttgaacagacctgagccccaggcaccgaggagggtgctggctgtaggtgaatggtagtggagccaggcttccactgcatcctggccaggggacggagccccttgccttcgtgccccttgcctgcgtgcccctgtgcttggagagaaaggggccggtgctggcgctcgcattcaataaagagtaatgtggcatttttctataataaacatggattacctgtgtttaaaaaaaaaagtgtgaatggcgttagggtaagggcacagccaggctggagtcagtgtctgcccctgaggtcttttaagttgagggctgggaatgaaacctatagcctttgtgctgttctgccttgcctgtgagctatgtcactcccctcccactcctgaccatattccagacacctgccctaatcctcagcctgctcacttcacttctgcattatatctccaaggcgttggtatatggaaaaagatgtaggggcttggaggtgttctggacagtggggagggctccagacccaacctggtcacagaagagcctctcccccatgcatactcatccacctccctcccctagagctattctcctttgggtttcttgctgcttcaattttatacaaccattatttaaatattattaaacacatattgttctctaggcactgtggtagtgggtttttttgttgtttttgtttttgagactgtctcaaaaactctgtcgcccaggctgacagtgcagtggcacaatcttggctcactgcagcctctgcctcctgggttcaagcgattctcgtgcatcagcctcctgagtaactggaattaataggcacgtgccaccatgtccatctaattcatatatatatattttttttttctgagacggagtctcactgtcacacaggctggagtgcagtggcacgatctcgactcactgcaagctccacctcctgggttcacgccattctcctgcctcagcctccccagtagctgggactacaggcgcccgccaccacgcccggctaattttttgtatttttagtagagatggggtttctccgtgttagccaggatggtctcgatctcctgacctcgtgatccgcccgccttggcctcccaaagtgctgggattacaggcgtgagccaccgcgcccggccgaattcatctatttttagtagagatggggtttcactatattggccaggctggtcttgaactcatgacctcagatgttcacttgtcttggcctcccaaagtgctgggattagaggcgtgagccaccgcacgcgggcctgtggtaaattgttgaatttgaaggactcagaggccctggtcaattccaaaataacgtaggcgacttccatccccctcctcccaaccattttcagcccaaagcatcttcgcagggaatggatggctgcgcggaggtgggcggtggctctggagagggtctttgcaggtgtgattttctctagaaggaaatgtctcgtcgtggacccagactgccccctcctggtttcagatgcagaagtgatactgtaagccagaggcgggggcagtaatgcatcgcagccattttaggtgaggatttccttggcggttatttgttaagttctttggctgggccctgggctggggtaacaatggacaggttccaggcatttttttcagaaagcttccagtgtagtggatacagaaacttcaggaaggcagggctgagaaggatctgagtaaaactcggtccttcaacaccatccttcagcccctgggtcatgttccttcgaggtcctggtgggaggtagacaagcctagccttgtgctgttcctgtaaggacagggtgggcattttctaccaacagaattcttggaattttcacacagcccagcctagccaagtccagggctatagcccagatacacaagttaaggtcccagcactggcacccaccacaggagcccccttacctctattacccagaagcttgtaggaggggtggtccgcagacaaggaccctgcacaggtgcgaccctgcttccctcctggtcataactttcatgttactattgcttgggataatgttaagtaaaaatagcagacactgagttttaagtctcaagtggatgaaggcagagatcgtgatacacttgagttaaagcagtagggttctgtcattttctattcctgttgtaaacattttctttaatgttattatttttaccactaaactaacgtggcctggtcacgactttcattggtaaagtgtgctgttcctcaccctccaccgttgctcctttggtccactgatcataagagcatttacctgaaggtcgtcagacctcgaatgccaacaggtcaactgcagtggcctgcagttaccacccagtctgttccaatgaacagaatcgctgttgccccaactcatctcccttcacctaggctgtaaattgaaagtcccacccctgagcggaacacaggccatcttgtgtgctgtgcaccaccagggggtggggaagtttccagactgacttcctggctccagtcatcctaggaaaagagttctccagtcgctccccacccccaccccttcccattccaggagtctattaaggaggcaaagcaggcctaacgggtatcaaagcaaaggagtgaatggagactgggagagtcttcaacctctcctctccttggtaggagctgaggctgcatgccaggtaccttcccttcgaggaatctaataaagctaggtcactggtgttttcaggtgcttctcaaaggattgccgtaggggtaggatatcaggatgtgggagcacaggtgccaccacagcactagtgatggagagtcattgcccctagacttctgggacagtgagactgtgaggaaagctgaaatgatactgggaaagggtgaaagaaaggatgtaggtggaatttatttagtattaatgtaggtacacataccttatggcaacattcctagcactctaaattctagatttgtatagtttctgtcaatatcttttgtaagcttaatcaatacagggcatgacaagtatgtgtcacatacttttttttccacgaagaaaaaaaataagtaggaattgggtgctttgtttatcaaaatttgtatttcctttataaataaactttgaaataaaggttgaaaattagta

SEQ ID NO: 868 - DNA, 4818 bp, Homo sapiens
  source 1..4818: mol_type = genomic DNA
ctcacgtggccagccccctccgagaggggagaccagcgggccatgacaagctccaggctttggttttcgctgctgctggcggcagcgttcgcaggacgggcgacggccctctggccctggcctcagaacttccaaacctccgaccagcgctacgtcctttacccgaacaactttcaattccagtacgatgtcagctcggccgcgcagcccggctgctcagtcctcgacgaggccttccagcgctatcgtgacctgcttttcggttccgggtcttggccccgtccttacctcacaggttggccgcaccaagcttaccctgtcttcctagggaaacggcatacactggagaagaatgtgttggttgtctctgtagtcacacctggatgtaaccagcttcctactttggagtcagtggagaattataccctgaccataaatgatgaccagtgtttactcctctctgagactgtctggggagctctccgaggtctggagacttttagccagcttgtttggaaatctgctgagggcacattctttatcaacaagactgagattgaggactttccccgctttcctcaccggggcttgctgttggatacatctcgccattacctgccactctctagcatcctggacactctggatgtcatggcgtacaataaattgaacgtgttccactggcatctggtagatgatccttccttcccatatgagagcttcacttttccagagctcatgagaaaggggtcctacaaccctgtcacccacatctacacagcacaggatgtgaaggaggtcattgaatacgcacggctccggggtatccgtgtgcttgcagagtttgacactcctggccacactttgtcctggggaccaggtatccctggattactgactccttgctactctgggtctgagccctctggcacctttggaccagtgaatcccagtctcaataatacctatgagttcatgagcacattcttcttagaagtcagctctgtcttcccagatttttatcttcatcttggaggagatgaggttgatttcacctgctggaagtccaacccagagatccaggactttatgaggaagaaaggcttcggtgaggacttcaagcagctggagtccttctacatccagacgctgctggacatcgtctcttcttatggcaagggctatgtggtgtggcaggaggtgtttgataataaagtaaagattcagccagacacaatcatacaggtgtggcgagaggatattccagtgaactatatgaaggagctggaactggtcaccaaggccggcttccgggcccttctctctgccccctggtacctgaaccgtatatcctatggccctgactggaaggatttctacatagtggaacccctggcatttgaaggtacccctgagcagaaggctctggtgattggtggagaggcttgtatgtggggagaatatgtggacaacacaaacctggtccccaggctctggcccagagcaggggctgttgccgaaaggctgtggagcaacaagttgacatctgacctgacatttgcctatgaacgtttgtcacacttccgctgtgaattgctgaggcgaggtgtccaggcccaacccctcaatgtaggcttctgtgagcaggagtttgaacagacctgagccccaggcaccgaggagggtgctggctgtaggtgaatggtagtggagccaggcttccactgcatcctggccaggggacggagccccttgccttcgtgccccttgcctgcgtgcccctgtgcttggagagaaaggggccggtgctggcgctcgcattcaataaagagtaatgtggcatttttctataataaacatggattacctgtgtttaaaaaaaaaagtgtgaatggcgttagggtaagggcacagccaggctggagtcagtgtctgcccctgaggtcttttaagttgagggctgggaatgaaacctatagcctttgtgctgttctgccttgcctgtgagctatgtcactcccctcccactcctgaccatattccagacacctgccctaatcctcagcctgctcacttcacttctgcattatatctccaaggcgttggtatatggaaaaagatgtaggggcttggaggtgttctggacagtggggagggctccagacccaacctggtcacagaagagcctctcccccatgcatactcatccacctccctcccctagagctattctcctttgggtttcttgctgcttcaattttatacaaccattatttaaatattattaaacacatattgttctctaggcactgtggtagtgggtttttttgttgtttttgtttttgagactgtctcaaaaactctgtcgcccaggctgacagtgcagtggcacaatcttggctcactgcagcctctgcctcctgggttcaagcgattctcgtgcatcagcctcctgagtaactggaattaataggcacgtgccaccatgtccatctaattcatatatatatattttttttttctgagacggagtctcactgtcacacaggctggagtgcagtggcacgatctcgactcactgcaagctccacctcctgggttcacgccattctcctgcctcagcctccccagtagctgggactacaggcgcccgccaccacgcccggctaattttttgtatttttagtagagatggggtttctccgtgttagccaggatggtctcgatctcctgacctcgtgatccgcccgccttggcctcccaaagtgctgggattacaggcgtgagccaccgcgcccggccgaattcatctatttttagtagagatggggtttcactatattggccaggctggtcttgaactcatgacctcagatgttcacttgtcttggcctcccaaagtgctgggattagaggcgtgagccaccgcacgcgggcctgtggtaaattgttgaatttgaaggactcagaggccctggtcaattccaaaataacgtaggcgacttccatccccctcctcccaaccattttcagcccaaagcatcttcgcagggaatggatggctgcgcggaggtgggcggtggctctggagagggtctttgcaggtgtgattttctctagaaggaaatgtctcgtcgtggacccagactgccccctcctggtttcagatgcagaagtgatactgtaagccagaggcgggggcagtaatgcatcgcagccattttaggtgaggatttccttggcggttatttgttaagttctttggctgggccctgggctggggtaacaatggacaggttccaggcatttttttcagaaagcttccagtgtagtggatacagaaacttcaggaaggcagggctgagaaggatctgagtaaaactcggtccttcaacaccatccttcagcccctgggtcatgttccttcgaggtcctggtgggaggtagacaagcctagccttgtgctgttcctgtaaggacagggtgggcattttctaccaacagaattcttggaattttcacacagcccagcctagccaagtccagggctatagcccagatacacaagttaaggtcccagcactggcacccaccacaggagcccccttacctctattacccagaagcttgtaggaggggtggtccgcagacaaggaccctgcacaggtgcgaccctgcttccctcctggtcataactttcatgttactattgcttgggataatgttaagtaaaaatagcagacactgagttttaagtctcaagtggatgaaggcagagatcgtgatacacttgagttaaagcagtagggttctgtcattttctattcctgttgtaaacattttctttaatgttattatttttaccactaaactaacgtggcctggtcacgactttcattggtaaagtgtgctgttcctcaccctccaccgttgctcctttggtccactgatcataagagcatttacctgaaggtcgtcagacctcgaatgccaacaggtcaactgcagtggcctgcagttaccacccagtctgttccaatgaacagaatcgctgttgccccaactcatctcccttcacctaggctgtaaattgaaagtcccacccctgagcggaacacaggccatcttgtgtgctgtgcaccaccagggggtggggaagtttccagactgacttcctggctccagtcatcctaggaaaagagttctccagtcgctccccacccccaccccttcccattccaggagtctattaaggaggcaaagcaggcctaacgggtatcaaagcaaaggagtgaatggagactgggagagtcttcaacctctcctctccttggtaggagctgaggctgcatgccaggtaccttcccttcgaggaatctaataaagctaggtcactggtgttttcaggtgcttctcaaaggattgccgtaggggtaggatatcaggatgtgggagcacaggtgccaccacagcactagtgatggagagtcattgcccctagacttctgggacagtgagactgtgaggaaagctgaaatgatactgggaaagggtgaaagaaaggatgtaggtggaatttatttagtattaatgtaggtacacataccttatggcaacattcctagcactctaaattctagatttgtatagtttctgtcaatatcttttgtaagcttaatcaatacagggcatgacaagtatgtgtcacatacttttttttccacgaagaaaaaaaataagtaggaattgggtgctttgtttatcaaaatttgtatttcctttataaataaactttgaaataaaggttgaaaattagta

SEQ ID NO: 869 - DNA, 1812 bp, Homo sapiens
  source 1..1812: mol_type = genomic DNA
agaccgggcggaaagcagccgagcggccatggagctgtgcgggctggggctgccccggccgcccatgctgctggcgctgctgttggcgacactgctggcggcgatgttggcgctgctgactcaggtggcgctggtggtgcaggtggcggaggcggctcgggccccgagcgtctcggccaagccggggccggcgctgtggcccctgccgctcttggtgaagatgaccccgaacctgctgcatctcgccccggagaacttctacatcagccacagccccaattccacggcgggcccctcctgcaccctgctggaggaagcgtttcgacgatatcatggctatatttttggtttctacaagtggcatcatgaacctgctgaattccaggctaaaacccaggttcagcaacttcttgtctcaatcacccttcagtcagagtgtgatgctttccccaacatatcttcagatgagtcttatactttacttgtgaaagaaccagtggctgtccttaaggccaacagagtttggggagcattacgaggtttagagacctttagccagttagtttatcaagattcttatggaactttcaccatcaatgaatccaccattattgattctccaaggttttctcacagaggaattttgattgatacatccagacattatctgccagttaagattattcttaaaactctggatgccatggcttttaataagtttaatgttcttcactggcacatagttgatgaccagtctttcccatatcagagcatcacttttcctgagttaagcaataaaggaagctattctttgtctcatgtttatacaccaaatgatgtccgtatggtgattgaatatgccagattacgaggaattcgagtcctgccagaatttgatacccctgggcatacactatcttggggaaaaggtcagaaagacctcctgactccatgttacagtagacaaaacaagttggactcttttggacctataaaccctactctgaatacaacatacagcttccttactacatttttcaaagaaattagtgaggtgtttccagatcaattcattcatttgggaggagatgaagtggaatttaaatgttgggaatcaaatccaaaaattcaagatttcatgaggcaaaaaggctttggcacagattttaagaaactagaatctttctacattcaaaaggttttggatattattgcaaccataaacaagggatccattgtctggcaggaggtttttgatgataaagcaaagcttgcgccgggcacaatagttgaagtatggaaagacagcgcatatcctgaggaactcagtagagtcacagcatctggcttccctgtaatcctttctgctccttggtacttagatttgattagctatggacaagattggaggaaatactataaagtggaacctcttgattttggcggtactcagaaacagaaacaacttttcattggtggagaagcttgtctatggggagaatatgtggatgcaactaacctcactccaagattatggcctcgggcaagtgctgttggtgagagactctggagttccaaagatgtcagagatatggatgacgcctatgacagactgacaaggcaccgctgcaggatggtcgaacgtggaatagctgcacaacctctttatgctggatattgtaaccatgagaacatgtaaaaaatggaggggaaaaaggccacagcaatctgtactacaatcaactttattttgaaatcatgtaaaataagatattagactgttttttgaataaaatatttttattgattgaa

SEQ ID NO: 870 - DNA, 2021 bp, Homo sapiens
  source 1..2021: mol_type = genomic DNA
gtatccttagctcggctcctcgcttccccagcggctcgccccagacattgcaccgcggaggggaggccggtcgacctctccggcgatgcccggcttctgcctgctgtgggagggcagcggcgggcaccgtgatctccgcaccgagaagagctccccttgccctctagtcgaagctcccgagtgctcggagcacgctcacccctcgcgaacacacccctgcagccgaagcagcccctgaagcccgcagcgcctgcaacaggtccggggcagtgggggaaacttacagcagtggcgactggccgcaacgcacaactgagttctagcgacggtcacgggcaaggaggcgacgaaccggtcgtctcagcccagggaagcggtggcgaatgccccggagaaaggagggccagccggggagaggactgcgccccgaacgatggctcgcggaccggctaccgatggcgttcgcctccgtctgtcgtccccacgccgcggacccggtgtccaggacccgcagagcgtctccggagcgcgtcacgatatcatggctatatttttggtttctacaagtggcatcatgaacctgctgaattccaggctaaaacccaggttcagcaacttcttgtctcaatcacccttcagtcagagtgtgatgctttccccaacatatcttcagatgagtcttatactttacttgtgaaagaaccagtggctgtccttaaggccaacagagtttggggagcattacgaggtttagagacctttagccagttagtttatcaagattcttatggaactttcaccatcaatgaatccaccattattgattctccaaggttttctcacagaggaattttgattgatacatccagacattatctgccagttaagattattcttaaaactctggatgccatggcttttaataagtttaatgttcttcactggcacatagttgatgaccagtctttcccatatcagagcatcacttttcctgagttaagcaataaaggaagctattctttgtctcatgtttatacaccaaatgatgtccgtatggtgattgaatatgccagattacgaggaattcgagtcctgccagaatttgatacccctgggcatacactatcttggggaaaaggtcagaaagacctcctgactccatgttacagtagacaaaacaagttggactcttttggacctataaaccctactctgaatacaacatacagcttccttactacatttttcaaagaaattagtgaggtgtttccagatcaattcattcatttgggaggagatgaagtggaatttaaatgttgggaatcaaatccaaaaattcaagatttcatgaggcaaaaaggctttggcacagattttaagaaactagaatctttctacattcaaaaggttttggatattattgcaaccataaacaagggatccattgtctggcaggaggtttttgatgataaagcaaagcttgcgccgggcacaatagttgaagtatggaaagacagcgcatatcctgaggaactcagtagagtcacagcatctggcttccctgtaatcctttctgctccttggtacttagatttgattagctatggacaagattggaggaaatactataaagtggaacctcttgattttggcggtactcagaaacagaaacaacttttcattggtggagaagcttgtctatggggagaatatgtggatgcaactaacctcactccaagattatggcctcgggcaagtgctgttggtgagagactctggagttccaaagatgtcagagatatggatgacgcctatgacagactgacaaggcaccgctgcaggatggtcgaacgtggaatagctgcacaacctctttatgctggatattgtaaccatgagaacatgtaaaaaatggaggggaaaaaggccacagcaatctgtactacaatcaactttattttgaaatcatgtaaaataagatattagactgttttttgaataaaatatttttattgattgaa

SEQ ID NO: 871 - DNA, 2291 bp, Homo sapiens
  source 1..2291: mol_type = genomic DNA
ggaattacttgcagggctaacctagtgcctatagctaaggcaggtacctgcatccttgtttttgtttagtggatcctctatccttcagagactctggaacccctgtggtcttctcttcatctaatgaccctgaggggatggagttttcaagtccttccagagaggaatgtcccaagcctttgagtagggtaagcatcatggctggcagcctcacaggattgcttctacttcaggcagtgtcgtgggcatcaggtgcccgcccctgcatccctaaaagcttcggctacagctcggtggtgtgtgtctgcaatgccacatactgtgactcctttgaccccccgacctttcctgcccttggtaccttcagccgctatgagagtacacgcagtgggcgacggatggagctgagtatggggcccatccaggctaatcacacgggcacaggcctgctactgaccctgcagccagaacagaagttccagaaagtgaagggatttggaggggccatgacagatgctgctgctctcaacatccttgccctgtcaccccctgcccaaaatttgctacttaaatcgtacttctctgaagaaggaatcggatataacatcatccgggtacccatggccagctgtgacttctccatccgcacctacacctatgcagacacccctgatgatttccagttgcacaacttcagcctcccagaggaagataccaagctcaagatacccctgattcaccgagccctgcagttggcccagcgtcccgtttcactccttgccagcccctggacatcacccacttggctcaagaccaatggagcggtgaatgggaaggggtcactcaagggacagcccggagacatctaccaccagacctgggccagatactttgtgaagttcctggatgcctatgctgagcacaagttacagttctgggcagtgacagctgaaaatgagccttctgctgggctgttgagtggataccccttccagtgcctgggcttcacccctgaacatcagcgagacttcattgcccgtgacctaggtcctaccctcgccaacagtactcaccacaatgtccgcctactcatgctggatgaccaacgcttgctgctgccccactgggcaaaggtggtactgacagacccagaagcagctaaatatgttcatggcattgctgtacattggtacctggactttctggctccagccaaagccaccctaggggagacacaccgcctgttccccaacaccatgctctttgcctcagaggcctgtgtgggctccaagttctgggagcagagtgtgcggctaggctcctgggatcgagggatgcagtacagccacagcatcatcacgaacctcctgtaccatgtggtcggctggaccgactggaaccttgccctgaaccccgaaggaggacccaattgggtgcgtaactttgtcgacagtcccatcattgtagacatcaccaaggacacgttttacaaacagcccatgttctaccaccttggccacttcagcaagttcattcctgagggctcccagagagtggggctggttgccagtcagaagaacgacctggacgcagtggcactgatgcatcccgatggctctgctgttgtggtcgtgctaaaccgctcctctaaggatgtgcctcttaccatcaaggatcctgctgtgggcttcctggagacaatctcacctggctactccattcacacctacctgtggcgtcgccagtgatggagcagatactcaaggaggcactgggctcagcctgggcattaaagggacagagtcagctcacacgctgtctgtgactaaagagggcacagcagggccagtgtgagcttacagcgacgtaagcccaggggcaatggtttgggtgactcactttcccctctaggtggtgccaggggctggaggcccctagaaaaagatcagtaagccccagtgtccccccagcccccatgcttatgtgaacatgcgctgtgtgctgcttgctttggaaactgggcctgggtccaggcctagggtgagctcactgtccgtacaaacacaagatcagggctgagggtaaggaaaagaagagactaggaaagctgggcccaaaactggagactgtttgtctttcctggagatgcagaactgggcccgtggagcagcagtgtcagcatcagggcggaagccttaaagcagcagcgggtgtgcccaggcacccagatgattcctatggcaccagccaggaaaaatggcagctcttaaaggagaaaatgtttgagccca

SEQ ID NO: 872 - DNA, 2344 bp, Homo sapiens
  source 1..2344: mol_type = genomic DNA
atcctgccttcagagtcttactgcgcggggccccagtctccagtcccgcccaggcgcctttgcaggctgcggtgggatttcgttttgcctccggttggggctgctgtttctcttcgccgacgtggatcctctatccttcagagactctggaacccctgtggtcttctcttcatctaatgaccctgaggggatggagttttcaagtccttccagagaggaatgtcccaagcctttgagtagggtaagcatcatggctggcagcctcacaggattgcttctacttcaggcagtgtcgtgggcatcaggtgcccgcccctgcatccctaaaagcttcggctacagctcggtggtgtgtgtctgcaatgccacatactgtgactcctttgaccccccgacctttcctgcccttggtaccttcagccgctatgagagtacacgcagtgggcgacggatggagctgagtatggggcccatccaggctaatcacacgggcacaggcctgctactgaccctgcagccagaacagaagttccagaaagtgaagggatttggaggggccatgacagatgctgctgctctcaacatccttgccctgtcaccccctgcccaaaatttgctacttaaatcgtacttctctgaagaaggaatcggatataacatcatccgggtacccatggccagctgtgacttctccatccgcacctacacctatgcagacacccctgatgatttccagttgcacaacttcagcctcccagaggaagataccaagctcaagatacccctgattcaccgagccctgcagttggcccagcgtcccgtttcactccttgccagcccctggacatcacccacttggctcaagaccaatggagcggtgaatgggaaggggtcactcaagggacagcccggagacatctaccaccagacctgggccagatactttgtgaagttcctggatgcctatgctgagcacaagttacagttctgggcagtgacagctgaaaatgagccttctgctgggctgttgagtggataccccttccagtgcctgggcttcacccctgaacatcagcgagacttcattgcccgtgacctaggtcctaccctcgccaacagtactcaccacaatgtccgcctactcatgctggatgaccaacgcttgctgctgccccactgggcaaaggtggtactgacagacccagaagcagctaaatatgttcatggcattgctgtacattggtacctggactttctggctccagccaaagccaccctaggggagacacaccgcctgttccccaacaccatgctctttgcctcagaggcctgtgtgggctccaagttctgggagcagagtgtgcggctaggctcctgggatcgagggatgcagtacagccacagcatcatcacgaacctcctgtaccatgtggtcggctggaccgactggaaccttgccctgaaccccgaaggaggacccaattgggtgcgtaactttgtcgacagtcccatcattgtagacatcaccaaggacacgttttacaaacagcccatgttctaccaccttggccacttcagcaagttcattcctgagggctcccagagagtggggctggttgccagtcagaagaacgacctggacgcagtggcactgatgcatcccgatggctctgctgttgtggtcgtgctaaaccgctcctctaaggatgtgcctcttaccatcaaggatcctgctgtgggcttcctggagacaatctcacctggctactccattcacacctacctgtggcgtcgccagtgatggagcagatactcaaggaggcactgggctcagcctgggcattaaagggacagagtcagctcacacgctgtctgtgactaaagagggcacagcagggccagtgtgagcttacagcgacgtaagcccaggggcaatggtttgggtgactcactttcccctctaggtggtgccaggggctggaggcccctagaaaaagatcagtaagccccagtgtccccccagcccccatgcttatgtgaacatgcgctgtgtgctgcttgctttggaaactgggcctgggtccaggcctagggtgagctcactgtccgtacaaacacaagatcagggctgagggtaaggaaaagaagagactaggaaagctgggcccaaaactggagactgtttgtctttcctggagatgcagaactgggcccgtggagcagcagtgtcagcatcagggcggaagccttaaagcagcagcgggtgtgcccaggcacccagatgattcctatggcaccagccaggaaaaatggcagctcttaaaggagaaaatgtttgagccca

SEQ ID NO: 873 - DNA, 2325 bp, Homo sapiens
  source 1..2325: mol_type = genomic DNA
atcctgccttcagagtcttactgcgcggggccccagtctccagtcccgcccaggcgcctttgcaggctgcggtgggatttcgttttgcctccggttggggctgctgtttctcttcgccgacgagactctggaacccctgtggtcttctcttcatctaatgaccctgaggggatggagttttcaagtccttccagagaggaatgtcccaagcctttgagtagggtaagcatcatggctggcagcctcacaggattgcttctacttcaggcagtgtcgtgggcatcaggtgcccgcccctgcatccctaaaagcttcggctacagctcggtggtgtgtgtctgcaatgccacatactgtgactcctttgaccccccgacctttcctgcccttggtaccttcagccgctatgagagtacacgcagtgggcgacggatggagctgagtatggggcccatccaggctaatcacacgggcacaggcctgctactgaccctgcagccagaacagaagttccagaaagtgaagggatttggaggggccatgacagatgctgctgctctcaacatccttgccctgtcaccccctgcccaaaatttgctacttaaatcgtacttctctgaagaaggaatcggatataacatcatccgggtacccatggccagctgtgacttctccatccgcacctacacctatgcagacacccctgatgatttccagttgcacaacttcagcctcccagaggaagataccaagctcaagatacccctgattcaccgagccctgcagttggcccagcgtcccgtttcactccttgccagcccctggacatcacccacttggctcaagaccaatggagcggtgaatgggaaggggtcactcaagggacagcccggagacatctaccaccagacctgggccagatactttgtgaagttcctggatgcctatgctgagcacaagttacagttctgggcagtgacagctgaaaatgagccttctgctgggctgttgagtggataccccttccagtgcctgggcttcacccctgaacatcagcgagacttcattgcccgtgacctaggtcctaccctcgccaacagtactcaccacaatgtccgcctactcatgctggatgaccaacgcttgctgctgccccactgggcaaaggtggtactgacagacccagaagcagctaaatatgttcatggcattgctgtacattggtacctggactttctggctccagccaaagccaccctaggggagacacaccgcctgttccccaacaccatgctctttgcctcagaggcctgtgtgggctccaagttctgggagcagagtgtgcggctaggctcctgggatcgagggatgcagtacagccacagcatcatcacgaacctcctgtaccatgtggtcggctggaccgactggaaccttgccctgaaccccgaaggaggacccaattgggtgcgtaactttgtcgacagtcccatcattgtagacatcaccaaggacacgttttacaaacagcccatgttctaccaccttggccacttcagcaagttcattcctgagggctcccagagagtggggctggttgccagtcagaagaacgacctggacgcagtggcactgatgcatcccgatggctctgctgttgtggtcgtgctaaaccgctcctctaaggatgtgcctcttaccatcaaggatcctgctgtgggcttcctggagacaatctcacctggctactccattcacacctacctgtggcgtcgccagtgatggagcagatactcaaggaggcactgggctcagcctgggcattaaagggacagagtcagctcacacgctgtctgtgactaaagagggcacagcagggccagtgtgagcttacagcgacgtaagcccaggggcaatggtttgggtgactcactttcccctctaggtggtgccaggggctggaggcccctagaaaaagatcagtaagccccagtgtccccccagcccccatgcttatgtgaacatgcgctgtgtgctgcttgctttggaaactgggcctgggtccaggcctagggtgagctcactgtccgtacaaacacaagatcagggctgagggtaaggaaaagaagagactaggaaagctgggcccaaaactggagactgtttgtctttcctggagatgcagaactgggcccgtggagcagcagtgtcagcatcagggcggaagccttaaagcagcagcgggtgtgcccaggcacccagatgattcctatggcaccagccaggaaaaatggcagctcttaaaggagaaaatgtttgagccca

SEQ ID NO: 874 - DNA, 2161 bp, Homo sapiens
  source 1..2161: mol_type = genomic DNA
atcctgccttcagagtcttactgcgcggggccccagtctccagtcccgcccaggcgcctttgcaggctgcggtgggatttcgttttgcctccggttggggctgctgtttctcttcgccgacggtgcccgcccctgcatccctaaaagcttcggctacagctcggtggtgtgtgtctgcaatgccacatactgtgactcctttgaccccccgacctttcctgcccttggtaccttcagccgctatgagagtacacgcagtgggcgacggatggagctgagtatggggcccatccaggctaatcacacgggcacaggcctgctactgaccctgcagccagaacagaagttccagaaagtgaagggatttggaggggccatgacagatgctgctgctctcaacatccttgccctgtcaccccctgcccaaaatttgctacttaaatcgtacttctctgaagaaggaatcggatataacatcatccgggtacccatggccagctgtgacttctccatccgcacctacacctatgcagacacccctgatgatttccagttgcacaacttcagcctcccagaggaagataccaagctcaagatacccctgattcaccgagccctgcagttggcccagcgtcccgtttcactccttgccagcccctggacatcacccacttggctcaagaccaatggagcggtgaatgggaaggggtcactcaagggacagcccggagacatctaccaccagacctgggccagatactttgtgaagttcctggatgcctatgctgagcacaagttacagttctgggcagtgacagctgaaaatgagccttctgctgggctgttgagtggataccccttccagtgcctgggcttcacccctgaacatcagcgagacttcattgcccgtgacctaggtcctaccctcgccaacagtactcaccacaatgtccgcctactcatgctggatgaccaacgcttgctgctgccccactgggcaaaggtggtactgacagacccagaagcagctaaatatgttcatggcattgctgtacattggtacctggactttctggctccagccaaagccaccctaggggagacacaccgcctgttccccaacaccatgctctttgcctcagaggcctgtgtgggctccaagttctgggagcagagtgtgcggctaggctcctgggatcgagggatgcagtacagccacagcatcatcacgaacctcctgtaccatgtggtcggctggaccgactggaaccttgccctgaaccccgaaggaggacccaattgggtgcgtaactttgtcgacagtcccatcattgtagacatcaccaaggacacgttttacaaacagcccatgttctaccaccttggccacttcagcaagttcattcctgagggctcccagagagtggggctggttgccagtcagaagaacgacctggacgcagtggcactgatgcatcccgatggctctgctgttgtggtcgtgctaaaccgctcctctaaggatgtgcctcttaccatcaaggatcctgctgtgggcttcctggagacaatctcacctggctactccattcacacctacctgtggcgtcgccagtgatggagcagatactcaaggaggcactgggctcagcctgggcattaaagggacagagtcagctcacacgctgtctgtgactaaagagggcacagcagggccagtgtgagcttacagcgacgtaagcccaggggcaatggtttgggtgactcactttcccctctaggtggtgccaggggctggaggcccctagaaaaagatcagtaagccccagtgtccccccagcccccatgcttatgtgaacatgcgctgtgtgctgcttgctttggaaactgggcctgggtccaggcctagggtgagctcactgtccgtacaaacacaagatcagggctgagggtaaggaaaagaagagactaggaaagctgggcccaaaactggagactgtttgtctttcctggagatgcagaactgggcccgtggagcagcagtgtcagcatcagggcggaagccttaaagcagcagcgggtgtgcccaggcacccagatgattcctatggcaccagccaggaaaaatggcagctcttaaaggagaaaatgtttgagccca

SEQ ID NO: 875 - DNA, 2144 bp, Homo sapiens
  source 1..2144: mol_type = genomic DNA
ggaattacttgcagggctaacctagtgcctatagctaaggcaggtacctgcatccttgtttttgtttagtggatcctctatccttcagagactctggaacccctgtggtcttctcttcatctaatgaccctgaggggatggagttttcaagtccttccagagaggaatgtcccaagcctttgagtagggtaagcatcatggctggcagcctcacaggattgcttctacttcaggcagtgtcgtgggcatcaggtgcccgcccctgcatccctaaaagcttcggctacagctcggtggtgtgtgtctgcaatgccacatactgtgactcctttgaccccccgacctttcctgcccttggtaccttcagccgctatgagagtacacgcagtgggcgacggatggagctgagtatggggcccatccaggctaatcacacgggcacaggaatcggatataacatcatccgggtacccatggccagctgtgacttctccatccgcacctacacctatgcagacacccctgatgatttccagttgcacaacttcagcctcccagaggaagataccaagctcaagatacccctgattcaccgagccctgcagttggcccagcgtcccgtttcactccttgccagcccctggacatcacccacttggctcaagaccaatggagcggtgaatgggaaggggtcactcaagggacagcccggagacatctaccaccagacctgggccagatactttgtgaagttcctggatgcctatgctgagcacaagttacagttctgggcagtgacagctgaaaatgagccttctgctgggctgttgagtggataccccttccagtgcctgggcttcacccctgaacatcagcgagacttcattgcccgtgacctaggtcctaccctcgccaacagtactcaccacaatgtccgcctactcatgctggatgaccaacgcttgctgctgccccactgggcaaaggtggtactgacagacccagaagcagctaaatatgttcatggcattgctgtacattggtacctggactttctggctccagccaaagccaccctaggggagacacaccgcctgttccccaacaccatgctctttgcctcagaggcctgtgtgggctccaagttctgggagcagagtgtgcggctaggctcctgggatcgagggatgcagtacagccacagcatcatcacgaacctcctgtaccatgtggtcggctggaccgactggaaccttgccctgaaccccgaaggaggacccaattgggtgcgtaactttgtcgacagtcccatcattgtagacatcaccaaggacacgttttacaaacagcccatgttctaccaccttggccacttcagcaagttcattcctgagggctcccagagagtggggctggttgccagtcagaagaacgacctggacgcagtggcactgatgcatcccgatggctctgctgttgtggtcgtgctaaaccgctcctctaaggatgtgcctcttaccatcaaggatcctgctgtgggcttcctggagacaatctcacctggctactccattcacacctacctgtggcgtcgccagtgatggagcagatactcaaggaggcactgggctcagcctgggcattaaagggacagagtcagctcacacgctgtctgtgactaaagagggcacagcagggccagtgtgagcttacagcgacgtaagcccaggggcaatggtttgggtgactcactttcccctctaggtggtgccaggggctggaggcccctagaaaaagatcagtaagccccagtgtccccccagcccccatgcttatgtgaacatgcgctgtgtgctgcttgctttggaaactgggcctgggtccaggcctagggtgagctcactgtccgtacaaacacaagatcagggctgagggtaaggaaaagaagagactaggaaagctgggcccaaaactggagactgtttgtctttcctggagatgcagaactgggcccgtggagcagcagtgtcagcatcagggcggaagccttaaagcagcagcgggtgtgcccaggcacccagatgattcctatggcaccagccaggaaaaatggcagctcttaaaggagaaaatgtttgagccca

SEQ ID NO: 876 - DNA, 20 bp, synthetic construct
  source 1..20: mol_type = other DNA
atggcatgatccccataagc

SEQ ID NO: 877 - DNA, 20 bp, synthetic construct
  source 1..20: mol_type = other DNA
aggaccagtacaacctgtag

SEQ ID NO: 878 - DNA, 20 bp, synthetic construct
  source 1..20: mol_type = other DNA
aggtgccccaacttgttacc

SEQ ID NO: 879 - DNA, 20 bp, synthetic construct
  source 1..20: mol_type = other DNA
actaaggtgccccaacttgt

SEQ ID NO: 880 - DNA, 20 bp, synthetic construct
  source 1..20: mol_type = other DNA
accaggtagtcccaaataac

SEQ ID NO: 881 - DNA, 20 bp, synthetic construct
  source 1..20: mol_type = other DNA
gcctgacccctatacttgac

SEQ ID NO: 882 - DNA, 20 bp, synthetic construct
  source 1..20: mol_type = other DNA
ctgacccctatacttgacag

SEQ ID NO: 883 - DNA, 20 bp, synthetic construct
  source 1..20: mol_type = other DNA
ttaagccctttggtccaacc

SEQ ID NO: 884 - DNA, 20 bp, synthetic construct
  source 1..20: mol_type = other DNA
gagttagcaccctctactac

SEQ ID NO: 885 - DNA, 20 bp, synthetic construct
  source 1..20: mol_type = other DNA
gtcataagtccttggtcaac

SEQ ID NO: 886 - DNA, 20 bp, synthetic construct
  source 1..20: mol_type = other DNA
aagcctgacccctatacttg

SEQ ID NO: 887 - DNA, 20 bp, synthetic construct
  source 1..20: mol_type = other DNA
agcctgacccctatacttga

SEQ ID NO: 888 - DNA, 20 bp, synthetic construct
  source 1..20: mol_type = other DNA
catcctattagcttaaaccc

SEQ ID NO: 889 - DNA, 20 bp, synthetic construct
  source 1..20: mol_type = other DNA
cctgacccctatacttgaca

SEQ ID NO: 890 - DNA, 20 bp, synthetic construct
  source 1..20: mol_type = other DNA
  modified_base 19: mod_base = i
tatgatctgatagccaacnc

SEQ ID NO: 891 - DNA, 20 bp, synthetic construct
  source 1..20: mol_type = other DNA
gtaccaggaccagtacaacc

SEQ ID NO: 892 - DNA, 20 bp, synthetic construct
  source 1..20: mol_type = other DNA
caggaccagtacaacctgta

SEQ ID NO: 893 - DNA, 20 bp, synthetic construct
  source 1..20: mol_type = other DNA
  modified_base 18: mod_base = i
acaccctttggagtgtcnag

SEQ ID NO: 894 - DNA, 20 bp, synthetic construct
  source 1..20: mol_type = other DNA
gccccaacttgttacctaag

SEQ ID NO: 895 - DNA, 20 bp, synthetic construct
  source 1..20: mol_type = other DNA
ccccaatctagttcaagcat

SEQ ID NO: 896 - DNA, 20 bp, synthetic construct
  source 1..20: mol_type = other DNA
  modified_base 18: mod_base = i
tccaagagttagcacccnct

SEQ ID NO: 897 - DNA, 20 bp, synthetic construct
  source 1..20: mol_type = other DNA
ggaccagtacaacctgtagt

SEQ ID NO: 898 - DNA, 20 bp, synthetic construct
  source 1..20: mol_type = other DNA
aaacccagtgtagctccatt

SEQ ID NO: 899 - DNA, 20 bp, synthetic construct
  source 1..20: mol_type = other DNA
tgccccaacttgttacctaa

SEQ ID NO: 900 - DNA, 20 bp, synthetic construct
  source 1..20: mol_type = other DNA
ccaatagcaagcagcctata

SEQ ID NO: 901 - DNA, 20 bp, synthetic construct
  source 1..20: mol_type = other DNA
ctacaatcaaatcctggtag

SEQ ID NO: 902 - DNA, 20 bp, synthetic construct
  source 1..20: mol_type = other DNA
gaccaagtttatggacccca

SEQ ID NO: 903 - DNA, 20 bp, synthetic construct
  source 1..20: mol_type = other DNA
gtgaccaccatctatagtta

SEQ ID NO: 904 - DNA, 20 bp, synthetic construct
  source 1..20: mol_type = other DNA
ctaaggtaactgttcctaga

SEQ ID NO: 905 - DNA, 20 bp, synthetic construct
  source 1..20: mol_type = other DNA
tgaccaagtttatggacccc

SEQ ID NO: 906 - DNA, 20 bp, synthetic construct
  source 1..20: mol_type = other DNA
accaagtttatggaccccaa

SEQ ID NO: 907 - DNA, 20 bp, synthetic construct
  source 1..20: mol_type = other DNA
gcaataaagctaaccacatc

SEQ ID NO: 908 - DNA, 20 bp, synthetic construct
  source 1..20: mol_type = other DNA
gattctaccacacagtacac

SEQ ID NO: 909 - DNA, 18 bp, synthetic construct
  source 1..18: mol_type = other DNA
gcagacaggtgtactgga

SEQ ID NO: 910 - DNA, 18 bp, synthetic construct
  source 1..18: mol_type = other DNA
agacaggtgtactggaca

SEQ ID NO: 911 - DNA, 18 bp, synthetic construct
  source 1..18: mol_type = other DNA
acaggtgtactggacatg

SEQ ID NO: 912 - DNA, 18 bp, synthetic construct
  source 1..18: mol_type = other DNA
aggtgtactggacatggt

SEQ ID NO: 913 - DNA, 18 bp, synthetic construct
  source 1..18: mol_type = other DNA
aggcagctggaagagaca

SEQ ID NO: 914 - DNA, 18 bp, synthetic construct
  source 1..18: mol_type = other DNA
ggcagctggaagagacat

SEQ ID NO: 915 - DNA, 18 bp, synthetic construct
  source 1..18: mol_type = other DNA
gcagctggaagagacata

SEQ ID NO: 916 - DNA, 18 bp, synthetic construct
  source 1..18: mol_type = other DNA
cagctggaagagacatac

SEQ ID NO: 917 - DNA, 18 bp, synthetic construct
  source 1..18: mol_type = other DNA
agctggaagagacatacc

SEQ ID NO: 918 - DNA, 18 bp, synthetic construct
  source 1..18: mol_type = other DNA
gctggaagagacataccc

SEQ ID NO: 919 - DNA, 18 bp, synthetic construct
  source 1..18: mol_type = other DNA
ctggaagagacataccca

SEQ ID NO: 920 - DNA, 18 bp, synthetic construct
  source 1..18: mol_type = other DNA
tggaagagacatacccag

SEQ ID NO: 921 - DNA, 18 bp, synthetic construct
  source 1..18: mol_type = other DNA
ggaagagacatacccaga

SEQ ID NO: 922 - DNA, 18 bp, synthetic construct
  source 1..18: mol_type = other DNA
gaagagacatacccagac

SEQ ID NO: 923 - DNA, 18 bp, synthetic construct
  source 1..18: mol_type = other DNA
aagagacatacccagaca

SEQ ID NO: 924 - DNA, 18 bp, synthetic construct
  source 1..18: mol_type = other DNA
agagacatacccagacac

SEQ ID NO: 925 - DNA, 18 bp, synthetic construct
  source 1..18: mol_type = other DNA
gagacatacccagacaca

SEQ ID NO: 926 - DNA, 18 bp, synthetic construct
  source 1..18: mol_type = other DNA
agacatacccagacacaa

SEQ ID NO: 927 - DNA, 18 bp, synthetic construct
  source 1..18: mol_type = other DNA
gacatacccagacacaaa

SEQ ID NO: 928 - DNA, 18 bp, synthetic construct
  source 1..18: mol_type = other DNA
acatacccagacacaaac

SEQ ID NO: 929 - DNA, 18 bp, synthetic construct
  source 1..18: mol_type = other DNA
catacccagacacaaacg

SEQ ID NO: 930 - DNA, 18 bp, synthetic construct
  source 1..18: mol_type = other DNA
tagttcctggggataaga

SEQ ID NO: 931 - DNA, 18 bp, synthetic construct
  source 1..18: mol_type = other DNA
agttcctggggataagag

SEQ ID NO: 932 - DNA, 18 bp, synthetic construct
  source 1..18: mol_type = other DNA
gttcctggggataagagt

SEQ ID NO: 933 - DNA, 18 bp, synthetic construct
  source 1..18: mol_type = other DNA
ttcctggggataagagtt

SEQ ID NO: 934 - DNA, 18 bp, synthetic construct
  source 1..18: mol_type = other DNA
tcctggggataagagttc

SEQ ID NO: 935 - DNA, 18 bp, synthetic construct
  source 1..18: mol_type = other DNA
cctggggataagagttct

SEQ ID NO: 936 - DNA, 18 bp, synthetic construct
  source 1..18: mol_type = other DNA
ctggggataagagttctt

SEQ ID NO: 937 - DNA, 18 bp, synthetic construct
  source 1..18: mol_type = other DNA
tggggataagagttcttt

SEQ ID NO: 938 - DNA, 18 bp, synthetic construct
  source 1..18: mol_type = other DNA
ggggataagagttctttc

SEQ ID NO: 939 - DNA, 18 bp, synthetic construct
  source 1..18: mol_type = other DNA
gggataagagttctttcc

SEQ ID NO: 940 - DNA, 18 bp, synthetic construct
  source 1..18: mol_type = other DNA
catctgttcaatcattca

SEQ ID NO: 941 - DNA, 18 bp, synthetic construct
  source 1..18: mol_type = other DNA
tctgttcaatcattcatt

SEQ ID NO: 942 - DNA, 18 bp, synthetic construct
  source 1..18: mol_type = other DNA
tgttcaatcattcattca

SEQ ID NO: 943 - DNA, 18 bp, synthetic construct
  source 1..18: mol_type = other DNA
ttcaatcattcattcatt

SEQ ID NO: 944 - DNA, 18 bp, synthetic construct
  source 1..18: mol_type = other DNA
caatcattcattcattca

SEQ ID NO: 945 - DNA, 18 bp, synthetic construct
  source 1..18: mol_type = other DNA
atcattcattcattcacc

SEQ ID NO: 946 - DNA, 18 bp, synthetic construct
  source 1..18: mol_type = other DNA
cattcattcattcaccag

SEQ ID NO: 947 - DNA, 18 bp, synthetic construct
  source 1..18: mol_type = other DNA
ttcattcattcaccagca

SEQ ID NO: 948 - DNA, 18 bp, synthetic construct
  source 1..18: mol_type = other DNA
cattcattcaccagcatt

SEQ ID NO: 949 - DNA, 18 bp, synthetic construct
  source 1..18: mol_type = other DNA
ttcattcaccagcattta

SEQ ID NO: 950 - DNA, 18 bp, synthetic construct
  source 1..18: mol_type = other DNA
cattcaccagcatttatt

SEQ ID NO: 951 - DNA, 18 bp, synthetic construct
  source 1..18: mol_type = other DNA
ttcaccagcatttattca

SEQ ID NO: 952 - DNA, 18 bp, synthetic construct
  source 1..18: mol_type = other DNA
caccagcatttattcaac

SEQ ID NO: 953 - DNA, 18 bp, synthetic construct
  source 1..18: mol_type = other DNA
ccagcatttattcaacaa

SEQ ID NO: 954 - DNA, 18 bp, synthetic construct
  source 1..18: mol_type = other DNA
agcatttattcaacaaac

SEQ ID NO: 955 - DNA, 18 bp, synthetic construct
  source 1..18: mol_type = other DNA
catttattcaacaaacta

SEQ ID NO: 956 - DNA, 18 bp, synthetic construct
  source 1..18: mol_type = other DNA
tttattcaacaaactagt

SEQ ID NO: 957 - DNA, 18 bp, synthetic construct
  source 1..18: mol_type = other DNA
tattcaacaaactagttc

SEQ ID NO: 958 - DNA, 18 bp, synthetic construct
  source 1..18: mol_type = other DNA
ttcaacaaactagttcct

SEQ ID NO: 959 - DNA, 18 bp, synthetic construct
  source 1..18: mol_type = other DNA
caacaaactagttcctgg

SEQ ID NO: 960 - DNA, 18 bp, synthetic construct
  source 1..18: mol_type = other DNA
acaaactagttcctgggg

SEQ ID NO: 961 - DNA, 18 bp, synthetic construct
  source 1..18: mol_type = other DNA
aaactagttcctggggat

SEQ ID NO: 962 - DNA, 18 bp, synthetic construct
  source 1..18: mol_type = other DNA
actagttcctggggataa

SEQ ID NO: 963 - DNA, 18 bp, synthetic construct
  source 1..18: mol_type = other DNA
ggataagagttctttcca

SEQ ID NO: 964 - DNA, 18 bp, synthetic construct
  source 1..18: mol_type = other DNA
gataagagttctttccag

SEQ ID NO: 965 - DNA, 18 bp, synthetic construct
  source 1..18: mol_type = other DNA
ataagagttctttccagg

SEQ ID NO: 966 - DNA, 18 bp, synthetic construct
  source 1..18: mol_type = other DNA
taagagttctttccagga

SEQ ID NO: 967 - DNA, 18 bp, synthetic construct
  source 1..18: mol_type = other DNA
aagagttctttccaggaa

SEQ ID NO: 968 - DNA, 18 bp, synthetic construct
  source 1..18: mol_type = other DNA
agagttctttccaggaaa

SEQ ID NO: 969 - DNA, 18 bp, synthetic construct
  source 1..18: mol_type = other DNA
gagttctttccaggaaac

SEQ ID NO: 970 - DNA, 18 bp, synthetic construct
  source 1..18: mol_type = other DNA
agttctttccaggaaacc

SEQ ID NO: 971 - DNA, 18 bp, synthetic construct
  source 1..18: mol_type = other DNA
gttctttccaggaaaccc

SEQ ID NO: 972 - DNA, 18 bp, synthetic construct
  source 1..18: mol_type = other DNA
actcatcactcattcatc

SEQ ID NO: 973 - DNA, 18 bp, synthetic construct
  source 1..18: mol_type = other DNA
tcatcactcattcatctg

SEQ ID NO: 974 - DNA, 18 bp, synthetic construct
  source 1..18: mol_type = other DNA
atcactcattcatctgtt

SEQ ID NO: 975 - DNA, 18 bp, synthetic construct
  source 1..18: mol_type = other DNA
cactcattcatctgttca

SEQ ID NO: 976 - DNA, 18 bp, synthetic construct
  source 1..18: mol_type = other DNA
ctcattcatctgttcaat

SEQ ID NO: 977 - DNA, 18 bp, synthetic construct
  source 1..18: mol_type = other DNA
cattcatctgttcaatca

SEQ ID NO: 978 - DNA, 18 bp, synthetic construct
  source 1..18: mol_type = other DNA
ttcatctgttcaatcatt

SEQ ID NO: 979 - DNA, 21 bp, synthetic construct
  source 1..21: mol_type = other DNA
cacccatctctccatccatgc

SEQ ID NO: 980 - DNA, 21 bp, synthetic construct
  source 1..21: mol_type = other DNA
cacccatctctccatccatcc

SEQ ID NO: 981 - DNA, 21 bp, synthetic construct
  source 1..21: mol_type = other DNA
ctcacccatctctccatccat

SEQ ID NO: 982 - DNA, 21 bp, synthetic construct
  source 1..21: mol_type = other DNA
tgtactcacccatctctccat

SEQ ID NO: 983 - DNA, 21 bp, synthetic construct
  source 1..21: mol_type = other DNA
tccatgtactcacccatctct

SEQ ID NO: 984 - DNA, 21 bp, synthetic construct
  source 1..21: mol_type = other DNA
tccatccatgtactcacccat

SEQ ID NO: 985 - DNA, 21 bp, synthetic construct
  source 1..21: mol_type = other DNA
atctatccatccatgtactca

SEQ ID NO: 986 - DNA, 17 bp, synthetic construct
  source 1..17: mol_type = other DNA
tcacccatctctccatc

SEQ ID NO: 987 - DNA, 17 bp, synthetic construct
  source 1..17: mol_type = other DNA
gtactcacccatctctc

SEQ ID NO: 988 - DNA, 13 bp, synthetic construct
  source 1..13: mol_type = other DNA
cacccatctctcc

SEQ ID NO: 989 - RNA, 25 nt, synthetic construct
  source 1..25: mol_type = other RNA
catgtactcacccatctctccatcc

SEQ ID NO: 990 - RNA, 30 nt, synthetic construct
  source 1..30: mol_type = other RNA
atccatgtactcacccatctctccatccat

SEQ ID NO: 991 - DNA, 21 bp, synthetic construct
  source 1..21: mol_type = other DNA
caggcagctggaagagacata

SEQ ID NO: 992 - DNA, 21 bp, synthetic construct
  source 1..21: mol_type = other DNA
aacccaggcagctggaagaga

SEQ ID NO: 993 - DNA, 21 bp, synthetic construct
  source 1..21: mol_type = other DNA
ggaaacccaggcagctggaag

SEQ ID NO: 994 - DNA, 21 bp, synthetic construct
  source 1..21: mol_type = other DNA
tagggctggaatagaaggaag

SEQ ID NO: 995 - DNA, 21 bp, synthetic construct
  source 1..21: mol_type = other DNA
tgagtggttagggctggaata

SEQ ID NO: 996 - DNA, 20 bp, synthetic construct
  source 1..20: mol_type = other DNA
cccgtattcctcttaccatc

SEQ ID NO: 997 - DNA, 20 bp, synthetic construct
  source 1..20: mol_type = other DNA
gcacggtattagtgtcttca

SEQ ID NO: 998 - DNA, 20 bp, synthetic construct
  source 1..20: mol_type = other DNA
gcttctcaaatcaggtgtac

SEQ ID NO: 999 - DNA, 20 bp, synthetic construct
  source 1..20: mol_type = other DNA
gcctttataacttttctttc

SEQ ID NO: 1000 - DNA, 20 bp, synthetic construct
  source 1..20: mol_type = other DNA
ttcagtttagttgcagccat

SEQ ID NO: 1001 - DNA, 17 bp, synthetic construct
  source 1..17: mol_type = other DNA
tcagtttagttgcagcc

SEQ ID NO: 1002 - DNA, 20 bp, synthetic construct
  source 1..20: mol_type = other DNA
gctcatttattctcaagtac

SEQ ID NO: 1003 - DNA, 20 bp, synthetic construct
  source 1..20: mol_type = other DNA
gcaccatatatatctcagaa

SEQ ID NO: 1004 - DNA, 20 bp, synthetic construct
  source 1..20: mol_type = other DNA
gttaatactttttccagcct

SEQ ID NO: 1005 - DNA, 20 bp, synthetic construct
  source 1..20: mol_type = other DNA
agccaatatttataggtgct

SEQ ID NO: 1006 - DNA, 20 bp, synthetic construct
  source 1..20: mol_type = other DNA
gccattaatctatactgaat

SEQ ID NO: 1007 - DNA, 20 bp, synthetic construct
  source 1..20: mol_type = other DNA
gcatattggttttctcattt

SEQ ID NO: 1008 - DNA, 22 bp, synthetic construct
  source 1..22: mol_type = other DNA
gctgttgctgcttttgctgctg

SEQ ID NO: 1009 - DNA, 20 bp, synthetic construct
  source 1..20: mol_type = other DNA
ctgttgctgcttttgctgct

SEQ ID NO: 1010 - DNA, 22 bp, synthetic construct
  source 1..22: mol_type = other DNA
gagatatgtttctggaactacc

SEQ ID NO: 1011 - DNA, 21 bp, synthetic construct
  source 1..21: mol_type = other DNA
gcttctcgtctcttccgaagc

SEQ ID NO: 1012 - DNA, 20 bp, synthetic construct
  source 1..20: mol_type = other DNA
ccgaagctcttctgaagtaa

SEQ ID NO: 1013 - DNA, 20 bp, synthetic construct
  source 1..20: mol_type = other DNA
gaactctgtcctgataggtc

SEQ ID NO: 1014 - DNA, 20 bp, synthetic construct
  source 1..20: mol_type = other DNA
ctagatcactcccaagtgct

SEQ ID NO: 1015 - DNA, 18 bp, synthetic construct
  source 1..18: mol_type = other DNA
ataggtcccgctgctgct

SEQ ID NO: 1016 - DNA, 18 bp, synthetic construct
  source 1..18: mol_type = other DNA
cactttcataatgctggc

SEQ ID NO: 1017 - DNA, 20 bp, synthetic construct
  source 1..20: mol_type = other DNA
ttcactttcataatgctggc

SEQ ID NO: 1018 - DNA, 18 bp, synthetic construct
  source 1..18: mol_type = other DNA
gtccagggagaatttggt

SEQ ID NO: 1019 - DNA, 18 bp, synthetic construct
  source 1..18: mol_type = other DNA
gtggatagggaaaagcac

SEQ ID NO: 1020 - DNA, 18 bp, synthetic construct
  source 1..18: mol_type = other DNA
gggtccactgaaacgggg

SEQ ID NO: 1021 - DNA, 18 bp, synthetic construct
  source 1..18: mol_type = other DNA
ggatagggaaaagcacct

SEQ ID NO: 1022 - DNA, 18 bp, synthetic construct
  source 1..18: mol_type = other DNA
ggtccagggagaatttgg

SEQ ID NO: 1023 - DNA, 18 bp, synthetic construct
  source 1..18: mol_type = other DNA
aaacggggaggggatggc

SEQ ID NO: 1024 - DNA, 18 bp, synthetic construct
  source 1..18: mol_type = other DNA
gaaacggggaggggatgg

SEQ ID NO: 1025 - DNA, 18 bp, synthetic construct
  source 1..18: mol_type = other DNA
tgaaacggggaggggatg

SEQ ID NO: 1026 - DNA, 18 bp, synthetic construct
  source 1..18: mol_type = other DNA
ctgaaacggggaggggat

SEQ ID NO: 1027 - DNA, 18 bp, synthetic construct
  source 1..18: mol_type = other DNA
actgaaacggggagggga

SEQ ID NO: 1028 - DNA, 18 bp, synthetic construct
  source 1..18: mol_type = other DNA
cactgaaacggggagggg

SEQ ID NO: 1029 - DNA, 18 bp, synthetic construct
  source 1..18: mol_type = other DNA
ggtccactgaaacgggga

SEQ ID NO: 1030 - protein, 677 aa, synthetic construct
MPGFLVRILLLLLVLLLLGPTRGLRNATQRMFEIDYSRDSFLKDGQPFRYISGSIHYSRVPRFYWKDRLLKMKMAGLNAIQTYVPWNFHEPWPGQYQFSEDHDVEYFLRLAHELGLLVILRPGPYICAEWEMGGLPAWLLEKESILLRSSDPDYLAAVDKWLGVLLPKMKPLLYQNGGPVITVQVENEYGSYFACDFDYLRFLQKRFRHHLGDDVVLFTTDGAHKTFLKCGALQGLYTTVDFGTGSNITDAFLSQRKCEPKGPLINSEFYTGWLDHWGQPHSTIKTEAVASSLYDILARGASVNLYMFIGGTNFAYWNGANSPYAAQPTSYDYDAPLSEAGDLTEKYFALRNIIQKFEKVPEGPIPPSTPKFAYGKVTLEKLKTVGAALDILCPSGPIKSLYPLTFIQVKQHYGFVLYRTTLPQDCSNPAPLSSPLNGVHDRAYVAVDGIPQGVLERNNVITLNITGKAGATLDLLVENMGRVNYGAYINDFKGLVSNLTLSSNILTDWTIFPLDTEDAVRSHLGGWGHRDSGHHDEAWAHNSSNYTLPAFYMGNFSIPSGIPDLPQDTFIQFPGWTKGQVWINGFNLGRYWPARGPQLTLFVPQHILMTSAPNTITVLELEWAPCSSDDPELCAVTFVDRPVIGSSVTYDHPSKPVEKRLMPPPPQKNKDSWLDHV

SEQ ID NO: 1031 - protein, 654 aa, synthetic construct
LRNATQRMFEIDYSRDSFLKDGQPFRYISGSIHYSRVPRFYWKDRLLKMKMAGLNAIQTYVPWNFHEPWPGQYQFSEDHDVEYFLRLAHELGLLVILRPGPYICAEWEMGGLPAWLLEKESILLRSSDPDYLAAVDKWLGVLLPKMKPLLYQNGGPVITVQVENEYGSYFACDFDYLRFLQKRFRHHLGDDVVLFTTDGAHKTFLKCGALQGLYTTVDFGTGSNITDAFLSQRKCEPKGPLINSEFYTGWLDHWGQPHSTIKTEAVASSLYDILARGASVNLYMFIGGTNFAYWNGANSPYAAQPTSYDYDAPLSEAGDLTEKYFALRNIIQKFEKVPEGPIPPSTPKFAYGKVTLEKLKTVGAALDILCPSGPIKSLYPLTFIQVKQHYGFVLYRTTLPQDCSNPAPLSSPLNGVHDRAYVAVDGIPQGVLERNNVITLNITGKAGATLDLLVENMGRVNYGAYINDFKGLVSNLTLSSNILTDWTIFPLDTEDAVRSHLGGWGHRDSGHHDEAWAHNSSNYTLPAFYMGNFSIPSGIPDLPQDTFIQFPGWTKGQVWINGFNLGRYWPARGPQLTLFVPQHILMTSAPNTITVLELEWAPCSSDDPELCAVTFVDRPVIGSSVTYDHPSKPVEKRLMPPPPQKNKDSWLDHV

SEQ ID NO: 1032 - DNA, 2034 bp, synthetic construct
  source 1..2034: mol_type = other DNA
atgccggggttcctggttcgcatcctccttctgctgctggttctgctgcttctgggccctacgcgcggcttgcgcaatgccacccagaggatgtttgaaattgactatagccgggactccttcctcaaggatggccagccatttcgctacatctcaggaagcattcactactcccgtgtgccccgcttctactggaaggaccggctgctgaagatgaagatggctgggctgaacgccatccagacgtatgtgccctggaactttcatgagccctggccaggacagtaccagttttctgaggaccatgatgtggaatattttcttcggctggctcatgagctgggactgctggttatcctgaggcccgggccctacatctgtgcagagtgggaaatgggaggattacctgcttggctgctagagaaagagtctattcttctccgctcctccgacccagattacctggcagctgtggacaagtggttgggagtccttctgcccaagatgaagcctctcctctatcagaatggagggccagttataacagtgcaggttgaaaatgaatatggcagctactttgcctgtgattttgactacctgcgcttcctgcagaagcgctttcgccaccatctgggggatgatgtggttctgtttaccactgatggagcacataaaacattcctgaaatgtggggccctgcagggcctctacaccacggtggactttggaacaggcagcaacatcacagatgctttcctaagccagaggaagtgtgagcccaaaggacccttgatcaattctgaattctatactggctggctagatcactggggccaacctcactccacaatcaagaccgaagcagtggcttcctccctctatgatatacttgcccgtggggcgagtgtgaacttgtacatgtttataggtgggaccaattttgcctattggaatggggccaactcaccctatgcagcacagcccaccagctacgactatgatgccccactgagtgaggctggggacctcactgagaagtattttgctctgcgaaacatcatccagaagtttgaaaaagtaccagaaggtcctatccctccatctacaccaaagtttgcatatggaaaggtcactttggaaaagttaaagacagtgggagcagctctggacattctgtgtccctctgggcccatcaaaagcctttatcccttgacatttatccaggtgaaacagcattatgggtttgtgctgtaccggacaacacttcctcaagattgcagcaacccagcacctctctcttcacccctcaatggagtccacgatcgagcatatgttgctgtggatgggatcccccagggagtccttgagcgaaacaatgtgatcactctgaacataacagggaaagctggagccactctggaccttctggtagagaacatgggacgtgtgaactatggtgcatatatcaacgattttaagggtttggtttctaacctgactctcagttccaatatcctcacggactggacgatctttccactggacactgaggatgcagtgcgcagccacctggggggctggggacaccgtgacagtggccaccatgatgaagcctgggcccacaactcatccaactacacgctcccggccttttatatggggaacttctccattcccagtgggatcccagacttgccccaggacacctttatccagtttcctggatggaccaagggccaggtctggattaatggctttaaccttggccgctattggccagcccggggccctcagttgaccttgtttgtgccccagcacatcctgatgacctcggccccaaacaccatcaccgtgctggaactggagtgggcaccctgcagcagtgatgatccagaactatgtgctgtgacgttcgtggacaggccagttattggctcatctgtgacctacgatcatccctccaaacctgttgaaaaaagactcatgcccccacccccgcaaaaaaacaaagattcatggctggaccatgtatga

SEQ ID NO: 1033 - DNA, 2031 bp, synthetic construct
  source 1..2031: mol_type = other DNA
atgccgggctttctggtgcgcattctgctgctgctgctggtgctgctgctgctgggcccgacccgcggcctgcgcaacgcgacccagcgcatgtttgaaattgattatagccgcgatagctttctgaaagatggccagccgtttcgctatattagcggcagcattcattatagccgcgtgccgcgcttttattggaaagatcgcctgctgaaaatgaaaatggcgggcctgaacgcgattcagacctatgtgccgtggaactttcatgaaccgtggccgggccagtatcagtttagcgaagatcatgatgtggaatattttctgcgcctggcgcatgaactgggcctgctggtgattctgcgcccgggcccgtatatttgcgcggaatgggaaatgggcggcctgccggcgtggctgctggaaaaagaaagcattctgctgcgcagcagcgatccggattatctggcggcggtggataaatggctgggcgtgctgctgccgaaaatgaaaccgctgctgtatcagaacggcggcccggtgattaccgtgcaggtggaaaacgaatatggcagctattttgcgtgcgattttgattatctgcgctttctgcagaaacgctttcgccatcatctgggcgatgatgtggtgctgtttaccaccgatggcgcgcataaaacctttctgaaatgcggcgcgctgcagggcctgtataccaccgtggattttggcaccggcagcaacattaccgatgcgtttctgagccagcgcaaatgcgaaccgaaaggcccgctgattaacagcgaattttataccggctggctggatcattggggccagccgcatagcaccattaaaaccgaagcggtggcgagcagcctgtatgatattctggcgcgcggcgcgagcgtgaacctgtatatgtttattggcggcaccaactttgcgtattggaacggcgcgaacagcccgtatgcggcgcagccgaccagctatgattatgatgcgccgctgagcgaagcgggcgatctgaccgaaaaatattttgcgctgcgcaacattattcagaaatttgaaaaagtgccggaaggcccgattccgccgagcaccccgaaatttgcgtatggcaaagtgaccctggaaaaactgaaaaccgtgggcgcggcgctggatattctgtgcccgagcggcccgattaaaagcctgtatccgctgacctttattcaggtgaaacagcattatggctttgtgctgtatcgcaccaccctgccgcaggattgcagcaacccggcgccgctgagcagcccgctgaacggcgtgcatgatcgcgcgtatgtggcggtggatggcattccgcagggcgtgctggaacgcaacaacgtgattaccctgaacattaccggcaaagcgggcgcgaccctggatctgctggtggaaaacatgggccgcgtgaactatggcgcgtatattaacgattttaaaggcctggtgagcaacctgaccctgagcagcaacattctgaccgattggaccatttttccgctggataccgaagatgcggtgcgcagccatctgggcggctggggccatcgcgatagcggccatcatgatgaagcgtgggcgcataacagcagcaactataccctgccggcgttttatatgggcaactttagcattccgagcggcattccggatctgccgcaggatacctttattcagtttccgggctggaccaaaggccaggtgtggattaacggctttaacctgggccgctattggccggcgcgcggcccgcagctgaccctgtttgtgccgcagcatattctgatgaccagcgcgccgaacaccattaccgtgctggaactggaatgggcgccgtgcagcagcgatgatccggaactgtgcgcggtgacctttgtggatcgcccggtgattggcagcagcgtgacctatgatcatccgagcaaaccggtggaaaaacgcctgatgccgccgccgccgcagaaaaacaaagatagctggctggatcatgtg

SEQ ID NO: 1034 - DNA, 2034 bp, synthetic construct
  source 1..2034: mol_type = other DNA
atgcccggctttctcgtgcggattctcctgctgctgctggtgcttctgctgctgggccctaccagaggcctgagaaacgccacccagcggatgttcgagatcgactacagccgggacagcttcctgaaggacggccagcccttccggtacatcagcggcagcatccactacagcagagtgccccggttctactggaaggaccggctgctgaagatgaagatggccggcctgaacgccatccagacctacgtgccctggaacttccacgagccttggcctggccagtaccagttcagcgaggaccacgacgtggaatactttctgcggctggcccacgagctgggcctgctcgtgattctgaggcctggcccttacatctgcgccgagtgggagatgggaggactgcctgcttggctgctggaaaaagagagcatcctgctgcggagcagcgaccccgattatctggccgccgtggataagtggctgggcgtgctgctgcccaagatgaagcccctgctgtaccagaacggcggacccgtgatcaccgtgcaggtggaaaacgagtacggcagctacttcgcctgcgacttcgactacctgcggttcctgcagaagcggttcagacaccacctgggcgacgacgtggtgctgttcacaacagacggcgcccacaagacctttctgaagtgtggcgctctgcagggcctgtacaccaccgtggattttggcaccggcagcaatatcaccgacgcctttctgagccagcggaagtgcgagccaaagggccccctgatcaacagcgagttctacaccggctggctggaccactggggccagcctcacagcaccatcaagacagaggccgtggccagcagcctgtacgacatcctggctagaggcgccagcgtgaacctgtacatgtttatcggcggcaccaacttcgcctactggaacggcgccaacagcccttatgccgcccagcccaccagctacgactacgatgcccctctgtctgaggccggcgacctgaccgagaagtactttgccctgcggaacatcatccagaaattcgagaaggtgcccgagggccccatcccccctagcacacctaagttcgcctacggcaaagtgaccctggaaaagctgaaaaccgtgggagccgccctggacatcctgtgtcctagcggccctatcaagagcctgtaccccctgaccttcatccaagtgaagcagcactacggcttcgtgctgtaccggaccaccctgccccaggactgtagcaatcctgccccactgagcagccccctgaacggcgtgcacgatagagcctacgtggccgtggatggcatcccacagggggtgctggaacggaacaatgtgatcaccctgaacatcaccggcaaggctggcgccaccctggacctgctggtggaaaacatgggcagagtgaactacggcgcctacatcaacgacttcaagggcctggtgtccaacctgaccctgagcagcaacatcctgaccgactggaccatcttcccactggacaccgaggatgccgtgcggagccatctgggaggatggggacacagagatagcggccaccacgatgaagcctgggcccacaacagcagcaactacaccctgcctgccttctacatgggcaacttcagcatccccagcggcatccccgacctgccacaggacacctttatccagttccccggctggacaaagggacaagtgtggatcaatggcttcaacctgggcagatactggcccgccagaggccctcagctgaccctgtttgtgccccagcacattctgatgaccagcgcccccaacaccatcaccgtgctggaactggaatgggccccctgcagcagcgacgaccctgaactgtgtgccgtgaccttcgtggacaggcccgtgatcggcagcagcgtgacctacgaccaccccagcaagcccgtggaaaagcggctgatgcctcccccaccccagaagaacaaggactcctggctggatcacgtgtga

SEQ ID NO: 1035 - protein, 629 aa, synthetic construct [sequence omitted]

SEQ ID NO: 1036 - protein, 629 aa, synthetic construct
MPRYGASLRQSCPRSGREQGQDGTAGAPGLLWMGLALALALALALALSDSRVLWAPAEAHPLSPQGHPARLHRIVPRLRDVFGWGNLTCPICKGLFTAINLGLKKEPNVARVGSVAIKLCNLLKIAPPAVCQSIVHLFEDDMVEVWRRSVLSPSEACGLLLGSTCGHWDIFSSWNISLPTVPKPPPKPPSPPAPGAPVSRILFLTDLHWDHDYLEGTDPDCADPLCCRRGSGLPPASRPGAGYWGEYSKCDLPLRTLESLLSGLGPAGPFDMVYWTGDIPAHDVWHQTRQDQLRALTTVTALVRKFLGPVPVYPAVGNHESTPVNSFPPPFIEGNHSSRWLYEAMAKAWEPWLPAEALRTLRIGGFYALSPYPGLRLISLNMNFCSRENFWLLINSTDPAGQLQWLVGELQAAEDRGDKVHIIGHIPPGHCLKSWSWNYYRIVARYENTLAAQFFGHTHVDEFEVFYDEETLSRPLAVAFLAPSATTYIGLNPGYRVYQIDGNYSGSSHVVLDHETYILNLTQANIPGAIPHWQLLYRARETYGLPNTLPTAWHNLVYRMRGDMQLFQTFWFLYHKGHPPSEPCGTPCRLATLCAQLSARADSPALCRHLMPDGSLPEAQSLWPRPLFC

SEQ ID NO: 1037 - protein, 629 aa, synthetic construct [sequence omitted]

SEQ ID NO: 1038 - DNA, 1893 bp, synthetic construct
  source 1..1893: mol_type = other DNA
atgcctagatacggcgcctctctgagacagagctgccctagatctggcagagagcagggccaagacggaacagctggtgctcctggactgctgtggatgggacttgctctggctttggctctggccctggctcttgctctgagcgattctagagtgctgtgggcccctgccgaagctcatcctttgtctccacaaggacaccccgccagactgcacagaatcgtgcccagactgagagatgtgttcggctggggcaacctgacctgccctatctgcaagggcctgttcaccgccatcaacctgggcctgaagaaagaacccaacgtggccagagtgggcagcgtggccatcaagctgtgcaacctgctgaagattgcccctcctgccgtgtgccagtctatcgtgcacctgttcgaggacgacatggtggaagtgtggcggagaagcgtgctgtctccatctgaagcttgtggcctgctgctgggctctacatgtggccactgggacatctttagcagctggaacatcagcctgcctaccgtgcctaagcctcctccaaagcctccatctcctccagcacctggcgctccagtgtccagaatcctgttcctgaccgacctgcactgggaccacgattacctggaaggcaccgatcctgactgcgccgatcctctgtgttgcagaagaggctctggactgcctcctgcctctagaccaggtgccggatattggggcgagtacagcaagtgcgacctgcctctgagaaccctggaaagcctgctgtctggactgggacctgccggacctttcgatatggtgtactggaccggcgacatccccgctcacgacgtgtggcatcagaccagacaggaccagctgagagccctgacaacagtgacagccctcgtgcggaagtttctgggaccagtgcctgtgtatcccgccgtgggaaatcacgagagcacccctgtgaacagcttccctccacctttcatcgagggcaaccacagcagcaggtggctgtacgaagccatggccaaggcctgggaaccttggcttccagctgaagcactgcggaccctgagaatcggcggcttttatgccctgtctccttatcctggcctgagactgatcagcctgaacatgaatttctgcagccgcgagaacttctggctgctgatcaactccacagatcctgccggccagctgcagtggcttgttggagaattgcaggccgccgaggacagaggcgataaggtgcacatcatcggacacatccctccaggccactgcctgaagtcttggagctggaactactaccggattgtggccagatacgagaacaccctggccgctcagttcttcggccacacacacgtcgacgagttcgaggtgttctacgacgaggaaaccctgagcagacctctggccgtggcatttctggccccaagcgccaccacatatatcggactgaaccccggctaccgggtgtaccagatcgacggcaattacagcggcagcagccacgtcgtgctggaccacgaaacctacatcctgaatctgacccaggccaacattcccggcgctatccctcattggcagctgctgtacagagccagagagacatacggcctgcctaacacactgccaaccgcctggcacaacctggtgtacagaatgagaggcgacatgcagctgtttcagaccttctggttcctgtaccacaaggggcaccctccaagcgagccttgtggcacaccttgtagactggccactctgtgcgctcagctgtccgccagagctgattctcctgctctgtgcagacacctgatgcctgatggaagcctgcctgaggctcagagcctttggcctagacctctgttctgctgatga

SEQ ID NO: 1039 - DNA, 1893 bp, synthetic construct
  source 1..1893: mol_type = other DNA
atgcctagatacggcgcctctctgagacagagctgccctagatctggcagagagcagggccaagacggaacagctggtgctcctggactgctgtggatgggacttgtcctggctttggctctggccctggctcttgctctgagcgattctagagtgctgtgggcccctgccgaagctcatcctttgtctccacaaggacaccccgccagactgcacagaatcgtgcccagactgagagatgtgttcggctggggcaacctgacctgccctatctgcaagggcctgttcaccgccatcaacctgggcctgaagaaagaacccaacgtggccagagtgggcagcgtggccatcaagctgtgcaacctgctgaagattgcccctcctgccgtgtgccagtctatcgtgcacctgttcgaggacgacatggtggaagtgtggcggagaagcgtgctgtctccatctgaagcttgtggcctgctgctgggctctacatgtggccactgggacatctttagcagctggaacatcagcctgcctaccgtgcctaagcctcctccaaagcctccatctcctccagcacctggcgctccagtgtccagaatcctgttcctgaccgacctgcactgggaccacgattacctggaaggcaccgatcctgactgcgccgatcctctgtgttgcagaagaggctctggactgcctcctgcctctagaccaggtgccggatattggggcgagtacagcaagtgcgacctgcctctgagaaccctggaaagcctgctgtctggactgggacctgccggacctttcgatatggtgtactggaccggcgacatccccgctcacgacgtgtggcatcagaccagacaggaccagctgagagccctgacaacagtgacagccctcgtgcggaagtttctgggaccagtgcctgtgtatcccgccgtgggaaatcacgagagcacccctgtgaacagcttccctccacctttcatcgagggcaaccacagcagcaggtggctgtacgaagccatggccaaggcctgggaaccttggcttccagctgaagcactgcggaccctgagaatcggcggcttttatgccctgtctccttatcctggcctgagactgatcagcctgaacatgaatttctgcagccgcgagaacttctggctgctgatcaactccacagatcctgccggccagctgcagtggcttgttggagaattgcaggccgccgaggacagaggcgataaggtgcacatcatcggacacatccctccaggccactgcctgaagtcttggagctggaactactaccggattgtggccagatacgagaacaccctggccgctcagttcttcggccacacacacgtcgacgagttcgaggtgttctacgacgaggaaaccctgagcagacctctggccgtggcatttctggccccaagcgccaccacatatatcggactgaaccccggctaccgggtgtaccagatcgacggcaattacagcggcagcagccacgtcgtgctggaccacgaaacctacatcctgaatctgacccaggccaacattcccggcgctatccctcattggcagctgctgtacagagccagagagacatacggcctgcctaacacactgccaaccgcctggcacaacctggtgtacagaatgagaggcgacatgcagctgtttcagaccttctggttcctgtaccacaaggggcaccctccaagcgagccttgtggcacaccttgtagactggccactctgtgcgctcagctgtccgccagagctgattctcctgctctgtgcagacacctgatgcctgatggaagcctgcctgaggctcagagcctttggcctagacctctgttctgctgatga

SEQ ID NO: 1040 - DNA, 1893 bp, synthetic construct
  source 1..1893: mol_type = other DNA
atgcctagatacggcgcctctctgagacagagctgccctagatctggcagagagcagggccaagacggaacagctggtgctcctggactgctgtggatgggacttgctctggctttggctctggccctggctcttgctctgagcgattctagagtgctgtgggcccctgccgaagctcatcctttgtctccacaaggacaccccgccagactgcacagaatcgtgcccagactgagagatgtgttcggctggggcaacctgacctgccctatctgcaagggcctgttcaccgccatcaacctgggcctgaagaaagaacccaacgtggccagagtgggcagcgtggccatcaagctgtgcaacctgctgaagattgcccctcctgccgtgtgccagtctatcgtgcacctgttcgaggacgacatggtggaagtgtggcggagaagcgtgctgtctccatctgaagcttgtggcctgctgctgggctctacatgtggccactgggacatctttagcagctggaacatcagcctgcctaccgtgcctaagcctcctccaaagcctccatctcctccagcacctggcgctccagtgtccagaatcctgttcctgaccgacctgcactgggaccacgattacctggaaggcaccgatcctgactgcgccgatcctctgtgttgcagaagaggctctggactgcctcctgcctctagaccaggtgccggatattggggcgagtacagcaagtgcgacctgcctctgagaaccctggaaagcctgctgtctggactgggacctgccggacctttcgatatggtgtactggaccggcgacatccccgctcacgacgtgtggcatcagaccagacaggaccagctgagagccctgacaacagtgacagccctcgtgcggaagtttctgggaccagtgcctgtgtatcccgccgtgggaaatcacgagagcacccctgtgaacagcttccctccacctttcatcgagggcaaccacagcagcaggtggctgtacgaagccatggccaaggcctgggaaccttggcttccagctgaagcactgcggaccctgagaatcggcggcttttatgccctgtctccttatcctggcctgagactgatcagcctgaacatgaatttctgcagccgcgagaacttctggctgctgatcaactccacagatcctgccggccagctgcagtggcttgttggagaattgcaggccgccgaggacagaggcgataaggtgcacatcatcggacacatccctccaggccactgcctgaagtcttggagctggaactactaccggattgtggccagatacgagaacaccctggccgctcagttcttcggccacacacacgtcgacgagttcgaggtgttctacgacgaggaaaccctgagcagacctctggccgtggcatttctggccccaagcgccaccacatatatcggactgaaccccggctaccgggtgtaccagatcgacggcaattacagcggcagcagccacgtcgtgctggaccacgaaacctacatcctgaatctgacccaggccaacattcccggcgctatccctcattggcagctgctgtacagagccagagagacatacggcctgcctaacacactgccaaccgcctggcacaacctggtgtacagaatgagaggcgacatgcagctgtttcagaccttctggttcctgtaccacaaggggcaccctccaagcgagccttgtggcacaccttgtagactggccactctgtgcgctcagctgtccgccagagctgattctcctgctctgtgcagacacctgatgcctgacggaagcctgcctgaggctcagagcctttggcctagacctctgttctgctgataa

SEQ ID NO: 1041 - protein, 507 aa, synthetic construct
MGAPRSLLLALAAGLAVARPPNIVLIFADDLGYGDLGCYGHPSSTTPNLDQLAAGGLRFTDFYVPVSLCTPSRAALLTGRLPVRMGMYPGVLVPSSRGGLPLEEVTVAEVLAARGYLTGMAGKWHLGVGPEGAFLPPHQGFHRFLGIPYSHDQGPCQNLTCFPPATPCDGGCDQGLVPIPLLANLSVEAQPPWLPGLEARYMAFAHDLMADAQRQDRPFFLYYASHHTHYPQFSGQSFAERSGRGPFGDSLMELDAAVGTLMTAIGDLGLLEETLVIFTADNGPETMRMSRGGCSGLLRCGKGTTYEGGVREPALAFWPGHIAPGVTHELASSLDLLPTLAALAGAPLPNVTLDGFDLSPLLLGTGKSPRQSLFFYPSYPDEVRGVFAVRTGKYKAHFFTQGSAHSDTTADPACHASSSLTAHEPPLLYDLSKDPGENYNLLGGVAGATPEVLQALKQLQLLKAQLDAAVTFGPSQVARGEDPALQICCHPGCTPRPACCHCPDPHA

SEQ ID NO: 1042 - protein, 509 aa, synthetic construct
MSMGAPRSLLLALAAGLAVARPPNIVLIFADDLGYGDLGCYGHPSSTTPNLDQLAAGGLRFTDFYVPVSLCTPSRAALLTGRLPVRMGMYPGVLVPSSRGGLPLEEVTVAEVLAARGYLTGMAGKWHLGVGPEGAFLPPHQGFHRFLGIPYSHDQGPCQNLTCFPPATPCDGGCDQGLVPIPLLANLSVEAQPPWLPGLEARYMAFAHDLMADAQRQDRPFFLYYASHHTHYPQFSGQSFAERSGRGPFGDSLMELDAAVGTLMTAIGDLGLLEETLVIFTADNGPETMRMSRGGCSGLLRCGKGTTYEGGVREPALAFWPGHIAPGVTHELASSLDLLPTLAALAGAPLPNVTLDGFDLSPLLLGTGKSPRQSLFFYPSYPDEVRGVFAVRTGKYKAHFFTQGSAHSDTTADPACHASSSLTAHEPPLLYDLSKDPGENYNLLGGVAGATPEVLQALKQLQLLKAQLDAAVTFGPSQVARGEDPALQICCHPGCTPRPACCHCPDPHA

SEQ ID NO: 1043 - protein, 489 aa, synthetic construct
RPPNIVLIFADDLGYGDLGCYGHPSSTTPNLDQLAAGGLRFTDFYVPVSLCTPSRAALLTGRLPVRMGMYPGVLVPSSRGGLPLEEVTVAEVLAARGYLTGMAGKWHLGVGPEGAFLPPHQGFHRFLGIPYSHDQGPCQNLTCFPPATPCDGGCDQGLVPIPLLANLSVEAQPPWLPGLEARYMAFAHDLMADAQRQDRPFFLYYASHHTHYPQFSGQSFAERSGRGPFGDSLMELDAAVGTLMTAIGDLGLLEETLVIFTADNGPETMRMSRGGCSGLLRCGKGTTYEGGVREPALAFWPGHIAPGVTHELASSLDLLPTLAALAGAPLPNVTLDGFDLSPLLLGTGKSPRQSLFFYPSYPDEVRGVFAVRTGKYKAHFFTQGSAHSDTTADPACHASSSLTAHEPPLLYDLSKDPGENYNLLGGVAGATPEVLQALKQLQLLKAQLDAAVTFGPSQVARGEDPALQICCHPGCTPRPACCHCPDPHA

SEQ ID NO: 1044 - DNA, 1521 bp, synthetic construct
  source 1..1521: mol_type = other DNA
atgggagcccctagatctctgctgctggctctggctgctggactggcagttgccagacctcctaacatcgtgctgatcttcgccgacgatctcggctacggcgatctgggctgttacggacaccccagcagcaccacacctaacctggatcaacttgccgctggcggcctgagattcaccgatttctacgtgcccgtgtctctgtgcaccccttctagagctgctctgctgacaggcagactccctgtgcggatgggaatgtatcctggcgtgctggtgcctagctctagaggcggactgcctctggaagaagtgacagttgccgaagtgctggccgccagaggatatctgactggcatggccggaaagtggcacctcggagttggaccagaaggcgcttttctgcctcctcaccagggcttccaccggtttctgggcatcccttactctcacgatcagggcccctgccagaacctgacctgttttcctcctgccacaccttgcgacggcggctgtgatcaaggactggtgccaattcctctgctggccaacctgagcgtggaagctcaacctccttggctgccaggactggaagcccggtatatggccttcgctcacgacctgatggccgacgctcagagacaggacagaccattcttcctgtactacgccagccaccacacacactaccctcagtttagcggccagagcttcgccgagagatctggcagaggacctttcggcgacagcctgatggaactggatgccgctgtgggcacactgatgacagccatcggagatctgggactgctggaagagacactggtcatcttcaccgccgacaacggccccgagacaatgagaatgagcagaggcggctgtagcggcctgctgagatgtggcaagggcaccacatatgaaggcggcgtgagagaacctgctctggccttttggcctggccatattgctccaggcgtgacacacgagctggcctcttctctggatctgctgcctacactggcagctcttgctggtgctcccctgcctaatgtgaccctggatggcttcgatctgagcccactgctgctcggcacaggcaagtctccaagacagagcctgttcttctaccctagctaccccgacgaagtgcggggagtgtttgccgtgcggaccggaaagtataaggcccacttcttcacccaaggcagcgcccactctgacaccacagctgatcctgcttgtcacgccagctctagcctgacagcccatgaacctccactgctgtacgacctgagcaaggaccccggcgagaactacaatctgcttggcggagttgccggcgctacacctgaagttctgcaggccctgaaacagctccagctgctgaaagcccagctggacgctgccgtgacatttggacctagtcaggtggccagaggcgaggatcctgctctgcagatctgttgtcaccctggctgcacacccagacctgcctgctgtcattgtcctgatccacacgcc

SEQ ID NO: 1045 - DNA, 1527 bp, synthetic construct
  source 1..1527: mol_type = other DNA
atgtctatgggagcccctagatctctgctgctggctctggctgctggactggcagttgccagacctcctaacatcgtgctgatcttcgccgacgatctcggctacggcgatctgggctgttacggacaccccagcagcaccacacctaacctggatcaacttgccgctggcggcctgagattcaccgatttctacgtgcccgtgtctctgtgcaccccttctagagctgctctgctgacaggcagactccctgtgcggatgggaatgtatcctggcgtgctggtgcctagctctagaggcggactgcctctggaagaagtgacagttgccgaagtgctggccgccagaggatatctgactggcatggccggaaagtggcacctcggagttggaccagaaggcgcttttctgcctcctcaccagggcttccaccggtttctgggcatcccttactctcacgatcagggcccctgccagaacctgacctgttttcctcctgccacaccttgcgacggcggctgtgatcaaggactggtgccaattcctctgctggccaacctgagcgtggaagctcaacctccttggctgccaggactggaagcccggtatatggccttcgctcacgacctgatggccgacgctcagagacaggacagaccattcttcctgtactacgccagccaccacacacactaccctcagtttagcggccagagcttcgccgagagatctggcagaggacctttcggcgacagcctgatggaactggatgccgctgtgggcacactgatgacagccatcggagatctgggactgctggaagagacactggtcatcttcaccgccgacaacggccccgagacaatgagaatgagcagaggcggctgtagcggcctgctgagatgtggcaagggcaccacatatgaaggcggcgtgagagaacctgctctggccttttggcctggccatattgctccaggcgtgacacacgagctggcctcttctctggatctgctgcctacactggcagctcttgctggtgctcccctgcctaatgtgaccctggatggcttcgatctgagcccactgctgctcggcacaggcaagtctccaagacagagcctgttcttctaccctagctaccccgacgaagtgcggggagtgtttgccgtgcggaccggaaagtataaggcccacttcttcacccaaggcagcgcccactctgacaccacagctgatcctgcttgtcacgccagctctagcctgacagcccatgaacctccactgctgtacgacctgagcaaggaccccggcgagaactacaatctgcttggcggagttgccggcgctacacctgaagttctgcaggccctgaaacagctccagctgctgaaagcccagctggacgctgccgtgacatttggacctagtcaggtggccagaggcgaggatcctgctctgcagatctgttgtcaccctggctgcacacccagacctgcctgctgtcattgtcctgatccacacgcc

SEQ ID NO: 1046 - DNA, 1530 bp, synthetic construct
  source 1..1530: mol_type = other DNA
atgtccatgggcgccccccggtctctgctgctggcactggcagcaggactggcagtggccagaccccctaacatcgtgctgatcttcgcagacgatctgggatacggcgacctgggctgctatggccacccaagctccaccacacccaatctggaccagctggcagcaggaggactgaggttcaccgatttttacgtgccagtgagcctgtgtaccccatccagggcagcactgctgacaggcaggctgccagtgcgcatgggcatgtatcctggcgtgctggtgccatctagcaggggaggactgccactggaggaggtgaccgtggcagaggtgctggcagccagaggctacctgacaggaatggccggcaagtggcacctgggagtgggacctgagggcgccttcctgccaccccaccagggcttccaccggtttctgggcatcccttattcccacgaccagggcccatgccagaacctgacctgttttcctccagcaacaccatgcgacggaggatgtgatcagggactggtgcctatcccactgctggccaatctgtctgtggaggcacagccaccttggctgcctggactggaggcaaggtacatggcattcgcacacgacctgatggcagatgcacagcggcaggatagacctttctttctgtactatgcctcccaccacacccactatccacagttcagcggccagtcctttgcagagaggagcggaaggggaccattcggcgactccctgatggagctggatgccgccgtgggcaccctgatgacagcaatcggcgacctgggactgctggaggagaccctggtcatcttcaccgccgataacggccccgagacaatgcggatgtctagaggaggatgcagcggactgctgagatgtggcaagggaaccacatacgagggaggcgtgcgcgagcctgcactggcattttggccaggacacatcgcacctggagtgacccacgagctggcatcctctctggacctgctgccaacactggcagcactggcaggagcaccactgcctaatgtgaccctggacggcttcgatctgtctccactgctgctgggcaccggcaagtcccccagacagtctctgttcttttaccccagctatcctgatgaggtgcggggcgtgtttgccgtgagaaccggcaagtacaaggcccacttctttacacagggctctgcccacagcgacaccacagccgatcctgcatgccacgcaagctcctctctgaccgcacacgagccaccactgctgtacgacctgtccaaggaccccggcgagaactataatctgctgggaggagtggcaggagcaacccctgaggtgctgcaggccctgaagcagctgcagctgctgaaggcacagctggacgcagcagtgacattcggaccaagccaggtggcaaggggagaggaccccgcactgcagatctgctgtcaccctggatgcaccccaaggccagcatgctgtcactgtcctgatccacacgcctga

SEQ ID NO: 1047 - DNA, 1530 bp, synthetic construct
  source 1..1530: mol_type = other DNA
atgtccatgggggcaccgcggtccctcctcctggccctggctgctggcctggccgttgcccgtccgcccaacatcgtgctgatctttgccgacgacctcggctatggggacctgggctgctatgggcaccccagctctaccactcccaacctggaccagctggcggcgggagggctgcggttcacagacttctacgtgcctgtgtctctgtgcacaccctctagggccgccctcctgaccggccggctcccggttcggatgggcatgtaccctggcgtcctggtgcccagctcccgggggggcctgcccctggaggaggtgaccgtggccgaagtcctggctgcccgaggctacctcacaggaatggccggcaagtggcaccttggggtggggcctgagggggccttcctgcccccccatcagggcttccatcgatttctaggcatcccgtactcccacgaccagggcccctgccagaacctgacctgcttcccgccggccactccttgcgacggtggctgtgaccagggcctggtccccatcccactgttggccaacctgtccgtggaggcgcagcccccctggctgcccggactagaggcccgctacatggctttcgcccatgacctcatggccgacgcccagcgccaggatcgccccttcttcctgtactatgcctctcaccacacccactaccctcagttcagtgggcagagctttgcagagcgttcaggccgcgggccatttggggactccctgatggagctggatgcagctgtggggaccctgatgacagccataggggacctggggctgcttgaagagacgctggtcatcttcactgcagacaatggacctgagaccatgcgtatgtcccgaggcggctgctccggtctcttgcggtgtggaaagggaacgacctacgagggcggtgtccgagagcctgccttggccttctggccaggtcatatcgctcccggcgtgacccacgagctggccagctccctggacctgctgcctaccctggcagccctggctggggccccactgcccaatgtcaccttggatggctttgacctcagccccctgctgctgggcacaggcaagagccctcggcagtctctcttcttctacccgtcctacccagacgaggtccgtggggtttttgctgtgcggactggaaagtacaaggctcacttcttcacccagggctctgcccacagtgataccactgcagaccctgcctgccacgcctccagctctctgactgctcatgagcccccgctgctctatgacctgtccaaggaccctggtgagaactacaacctgctggggggtgtggccggggccaccccagaggtgctgcaagccctgaaacagcttcagctgctcaaggcccagttagacgcagctgtgaccttcggccccagccaggtggcccggggcgaggaccccgccctgcagatctgctgtcatcctggctgcaccccccgcccagcttgctgccattgcccagatccccatgcctga

SEQ ID NO: 1048 - DNA, 1530 bp, synthetic construct
  source 1..1530: mol_type = other DNA
atgtccatgggtgcccctagaagtttgctgcttgcattggctgctggcctggctgtggcaagacctcctaatattgtgttgatttttgccgatgatctgggttacggagatctgggttgctacggccaccctagtagcacgactcccaatctggaccagttggctgcagggggccttaggttcaccgatttctatgtcccagtgtccctgtgtactccttcacgggcagcattgctgacaggtagattgccggttaggatgggcatgtacccaggagtgctggttccttctagcagggggggactgccactggaagaggtgactgtggctgaggttctggcagctagaggctacctgacaggaatggcaggcaagtggcatcttggagtcggtcccgaaggggcctttctcccaccacaccagggcttccaccgcttcctgggtattccttactctcacgatcagggaccatgccagaatctgacctgctttcctcctgcgactccctgcgatggcggttgtgaccagggacttgttcctatcccactcttggctaatctttctgttgaggctcagccaccatggttgcccgggcttgaagcgaggtacatggcgttcgcacatgaccttatggcagacgctcagaggcaagaccggccttttttcctctattacgccagccaccatacccactatccacagttcagtggacagtcttttgcagaaagatctggtagagggccatttggggactccctgatggagctggacgctgctgtgggtaccctgatgaccgcgatcggggatttggggctgttggaggagacattggtgatattcaccgctgataacggtcctgaaacgatgagaatgtctagagggggatgttctggactcttgaggtgtgggaagggcaccacatacgaggggggagttagagaacccgcccttgcgttttggcctggacacatcgccccaggtgtcacgcatgagctcgcatcctctcttgacctgctgcctacccttgcagctctggctggagcacctctcccaaacgtgaccctggatggcttcgacctctccccactgttgctgggaacaggcaaatccccccgacagtcactgttcttctaccctagctatcctgacgaagtcagaggagtgtttgcagtccgcactggtaaatacaaagctcactttttcactcagggatccgctcattccgataccactgctgaccccgcttgccacgcttcaagcagtttgacagcccacgaacccccactcctgtacgacctgagcaaggatccgggcgagaattataatctcctgggtggagttgctggcgctaccccagaagtgctgcaggctctcaagcagctgcagttgctgaaggcccagctggacgcagccgtgacatttggtccatcccaggtggcaagaggcgaagacccagccctgcaaatctgttgtcatcctggatgtacccctcggccagcctgctgtcattgtccagatccccacgcctga

SEQ ID NO: 1049 - protein, 685 aa, synthetic construct
MAEWLLSASWQRRAKAMTAAAGSAGRAAVPLLLCALLAPGGAYVLDDSDGLGREFDGIGAVSGGGATSRLLVNYPEPYRSQILDYLFKPNFGASLHILKVEIGGDGQTTDGTEPSHMHYALDENYFRGYEWWLMKEAKKRNPNITLIGLPWSFPGWLGKGFDWPYVNLQLTAYYVVTWIVGAKRYHDLDIDYIGIWNERSYNANYIKILRKMLNYQGLQRVKIIASDNLWESISASMLLDAELFKVVDVIGAHYPGTHSAKDAKLTGKKLWSSEDFSTLNSDMGAGCWGRILNQNYINGYMTSTIAWNLVASYYEQLPYGRCGLMTAQEPWSGHYVVESPVWVSAHTTQFTQPGWYYLKTVGHLEKGGSYVALTDGLGNLTIIIETMSHKHSKCIRPFLPYFNVSQQFATFVLKGSFSEIPELQVWYTKLGKTSERFLFKQLDSLWLLDSDGSFTLSLHEDELFTLTTLTTGRKGSYPLPPKSQPFPSTYKDDFNVDYPFFSEAPNFADQTGVFEYFTNIEDPGEHHFTLRQVLNQRPITWAADASNTISIIGDYNWTNLTIKCDVYIETPDTGGVFIAGRVNKGGILIRSARGIFFWIFANGSYRVTGDLAGWIIYALGRVEVTAKKWYTLTLTIKGHFTSGMLNDKSLWTDIPVNFPKNGWAAIGTHSFEFAQFDNFLVEATR

SEQ ID NO: 1050 - protein, 685 aa, synthetic construct [sequence omitted]

SEQ ID NO: 1051 - protein, 644 aa, synthetic construct
GAYVLDDSDGLGREFDGIGAVSGGGATSRLLVNYPEPYRSQILDYLFKPNFGASLHILKVEIGGDGQTTDGTEPSHMHYALDENYFRGYEWWLMKEAKKRNPNITLIGLPWSFPGWLGKGFDWPYVNLQLTAYYVVTWIVGAKRYHDLDIDYIGIWNERSYNANYIKILRKMLNYQGLQRVKIIASDNLWESISASMLLDAELFKVVDVIGAHYPGTHSAKDAKLTGKKLWSSEDFSTLNSDMGAGCWGRILNQNYINGYMTSTIAWNLVASYYEQLPYGRCGLMTAQEPWSGHYVVESPVWVSAHTTQFTQPGWYYLKTVGHLEKGGSYVALTDGLGNLTIIIETMSHKHSKCIRPFLPYFNVSQQFATFVLKGSFSEIPELQVWYTKLGKTSERFLFKQLDSLWLLDSDGSFTLSLHEDELFTLTTLTTGRKGSYPLPPKSQPFPSTYKDDFNVDYPFFSEAPNFADQTGVFEYFTNIEDPGEHHFTLRQVLNQRPITWAADASNTISIIGDYNWTNLTIKCDVYIETPDTGGVFIAGRVNKGGILIRSARGIFFWIFANGSYRVTGDLAGWIIYALGRVEVTAKKWYTLTLTIKGHFTSGMLNDKSLWTDIPVNFPKNGWAAIGTHSFEFAQFDNFLVEAT

SEQ ID NO: 1052 - DNA, 2058 bp, synthetic construct
  source 1..2058: mol_type = other DNA
atggctgagtggctactctcggcttcctggcaacgccgagcgaaagctatgactgcggccgcgggttcggcgggccgcgccgcggtgcccttgctgctgtgtgcgctgctggcgcccggcggcgcgtacgtgctcgacgactccgacgggctgggccgggagttcgacggcatcggcgcggtcagcggcggcggggcaacctcccgacttctagtaaattacccagagccctatcgttctcagatattggattatctctttaagccgaattttggtgcctctttgcatattttaaaagtggaaataggtggtgatgggcagacaacagacggcactgagccctcccacatgcattatgcactagatgagaattatttccgaggatacgagtggtggttgatgaaagaagctaagaagaggaatcccaatattacactcattgggttgccatggtcattccctggatggctgggaaaaggtttcgactggccttatgtcaatcttcagctgactgcctattatgtcgtgacctggattgtgggcgccaagcgttaccatgatttggacattgattatattggaatttggaatgagaggtcatataatgccaattatattaagatattaagaaaaatgctgaattatcaaggtctccagcgagtgaaaatcatagcaagtgataatctctgggagtccatctctgcatccatgctccttgatgccgaactcttcaaggtggttgatgttataggggctcattatcctggaacccattcagcaaaagatgcaaagttgactgggaagaagctttggtcttctgaagactttagcactttaaatagtgacatgggtgcaggctgctggggtcgcattttaaatcagaattatatcaatggctatatgacttccacaatcgcatggaatttagtggctagttactatgaacagttgccttatgggagatgcgggttgatgacggcccaggagccatggagtgggcactacgtggtagaatctcctgtctgggtatcagctcataccactcagtttactcaacctggctggtattacctgaagacagttggccatttagagaaaggaggaagctacgtagctctgactgatggcttagggaacctcaccatcatcattgaaaccatgagtcataaacattctaagtgcatacggccatttcttccttatttcaatgtgtcacaacaatttgccacctttgttcttaagggatcttttagtgaaataccagagctacaggtatggtataccaaacttggaaaaacatccgaaagatttctttttaagcagctggattctctatggctccttgacagcgatggcagtttcacactgagcctgcatgaagatgagctgttcacactcaccactctcaccactggtcgcaaaggcagctacccgcttcctccaaaatcccagcccttcccaagtacctataaggatgatttcaatgttgattacccattttttagtgaagctccaaactttgctgatcaaactggtgtatttgaatattttacaaatattgaagaccctggcgagcatcacttcacgctacgccaagttctcaaccagagacccattacgtgggctgccgatgcatccaacacaatcagtattataggagactacaactggaccaatctgactataaagtgtgatgtatacatagagacccctgacacaggaggtgtgttcattgcaggaagagtaaataaaggtggtattttgattagaagtgccagaggaattttcttctggatttttgcaaatggatcttacagggttacaggtgatttagctggatggattatatatgctttaggacgtgttgaagttacagcaaaaaaatggtatacactcacgttaactattaagggtcatttcacctctggcatgctgaatgacaagtctctgtggacagacatccctgtgaattttccaaagaatggctgggctgcaattggaactcactcctttgaatttgcacagtttgacaactttcttgtggaagccacacgctaa

SEQ ID NO: 1053 - DNA, 1932 bp, synthetic construct
  source 1..1932: mol_type = other DNA
ggcgcgtacgtgctcgacgactccgacgggctgggccgggagttcgacggcatcggcgcggtcagcggcggcggggcaacctcccgacttctagtaaattacccagagccctatcgttctcagatattggattatctctttaagccgaattttggtgcctctttgcatattttaaaagtggaaataggtggtgatgggcagacaacagacggcactgagccctcccacatgcattatgcactagatgagaattatttccgaggatacgagtggtggttgatgaaagaagctaagaagaggaatcccaatattacactcattgggttgccatggtcattccctggatggctgggaaaaggtttcgactggccttatgtcaatcttcagctgactgcctattatgtcgtgacctggattgtgggcgccaagcgttaccatgatttggacattgattatattggaatttggaatgagaggtcatataatgccaattatattaagatattaagaaaaatgctgaattatcaaggtctccagcgagtgaaaatcatagcaagtgataatctctgggagtccatctctgcatccatgctccttgatgccgaactcttcaaggtggttgatgttataggggctcattatcctggaacccattcagcaaaagatgcaaagttgactgggaagaagctttggtcttctgaagactttagcactttaaatagtgacatgggtgcaggctgctggggtcgcattttaaatcagaattatatcaatggctatatgacttccacaatcgcatggaatttagtggctagttactatgaacagttgccttatgggagatgcgggttgatgacggcccaggagccatggagtgggcactacgtggtagaatctcctgtctgggtatcagctcataccactcagtttactcaacctggctggtattacctgaagacagttggccatttagagaaaggaggaagctacgtagctctgactgatggcttagggaacctcaccatcatcattgaaaccatgagtcataaacattctaagtgcatacggccatttcttccttatttcaatgtgtcacaacaatttgccacctttgttcttaagggatcttttagtgaaataccagagctacaggtatggtataccaaacttggaaaaacatccgaaagatttctttttaagcagctggattctctatggctccttgacagcgatggcagtttcacactgagcctgcatgaagatgagctgttcacactcaccactctcaccactggtcgcaaaggcagctacccgcttcctccaaaatcccagcccttcccaagtacctataaggatgatttcaatgttgattacccattttttagtgaagctccaaactttgctgatcaaactggtgtatttgaatattttacaaatattgaagaccctggcgagcatcacttcacgctacgccaagttctcaaccagagacccattacgtgggctgccgatgcatccaacacaatcagtattataggagactacaactggaccaatctgactataaagtgtgatgtatacatagagacccctgacacaggaggtgtgttcattgcaggaagagtaaataaaggtggtattttgattagaagtgccagaggaattttcttctggatttttgcaaatggatcttacagggttacaggtgatttagctggatggattatatatgctttaggacgtgttgaagttacagcaaaaaaatggtatacactcacgttaactattaagggtcatttcacctctggcatgctgaatgacaagtctctgtggacagacatccctgtgaattttccaaagaatggctgggctgcaattggaactcactcctttgaatttgcacagtttgacaactttcttgtggaagccaca

SEQ ID NO: 1054 - DNA, 2055 bp, synthetic construct
  source 1..2055: mol_type = other DNA
atggccgagtggctgctgtctgctagctggcagagaagggccaaggccatgacagccgccgctggatctgcaggcagagctgctgtgcctctgctgctgtgtgcactgctggcacctggcggagcctacgtgctggatgattctgacggcctgggcagagagttcgacggcatcggagctgtgtctggcggcggagccacaagcagactgctcgtgaactaccccgagccctacagaagccagatcctggactacctgttcaagcccaacttcggcgccagcctgcacatcctgaaggtggaaatcggcggcgacggccagaccaccgatggcacagaacctagccacatgcactacgccctggacgagaactacttccggggctacgagtggtggctgatgaaggaagccaagaagcggaaccccaacatcaccctgatcggcctgccttggagcttccctggctggctgggcaagggcttcgactggccttacgtgaacctgcagctgaccgcctactacgtcgtgacctggatcgtgggcgccaagagataccacgacctggacatcgactacatcggcatctggaacgagcggagctacaacgccaactacatcaagatcctgcggaagatgctgaactaccagggcctgcagagagtgaagatcattgccagcgacaacctgtgggagagcatcagcgcctccatgctgctggacgccgagctgttcaaggtggtggatgtgatcggcgcccactaccctggcacacactctgccaaggacgccaagctgaccggcaagaagctgtggtccagcgaggacttcagcaccctgaacagcgacatgggagccggctgctggggcagaatcctgaaccagaattacatcaacggctacatgaccagcacaatcgcctggaacctggtggccagctactacgagcagctgccctacggcagatgcggcctgatgacagcccaggaaccttggagcggccactacgtggtggaaagccctgtgtgggtgtccgcccacaccacccagtttacacagcccggctggtactacctgaaaaccgtgggccacctggaaaagggcggcagctatgtggccctgacagacggactgggcaacctgaccatcatcatcgagacaatgtcccacaagcacagcaagtgcatcagaccctttctgccctacttcaacgtgtcccagcagttcgccaccttcgtgctgaagggcagcttcagcgagatccccgaactgcaagtgtggtacaccaagctgggaaagaccagcgagcggttcctgtttaagcagctggacagcctgtggctgctggacagcgacggcagctttaccctgagcctgcacgaggacgagctgtttacactgaccaccctgaccacaggccggaagggctcttaccccctgcctcctaagagccagcccttcccaagcacctacaaggacgacttcaatgtggactacccattctttagcgaggcccccaatttcgccgaccagaccggcgtgttcgagtacttcaccaacatcgaggaccccggcgagcaccacttcaccctgagacaggtgctgaaccagcggcccatcacctgggctgccgatgccagcaacaccatcagcatcatcggcgactacaactggaccaatctgacaatcaagtgcgacgtgtacatcgaaacccccgacaccggcggagtgtttatcgccggcagagtgaacaagggcgggatcctgatcagaagcgccagaggcatcttcttttggatcttcgccaacggcagctacagagtgaccggcgatctggccggctggatcatctacgctctgggcagggtggaagtgaccgccaagaaatggtacaccctgacactgactatcaagggccacttcgcctccggcatgctgaacgacaagagcctgtggaccgacatccccgtgaacttccccaagaatggctgggccgccatcggcacccacagctttgagttcgcccagttcgacaacttcctggtggaagccaccaga

SEQ ID NO: 1055 - protein, 529 aa, synthetic construct
MTSSRLWFSLLLAAAFAGRATALWPWPQNFQTSDQRYVLYPNNFQFQYDVSSAAQPGCSVLDEAFQRYRDLLFGSGSWPRPYLTGKRHTLEKNVLVVSVVTPGCNQLPTLESVENYTLTINDDQCLLLSETVWGALRGLETFSQLVWKSAEGTFFINKTEIEDFPRFPHRGLLLDTSRHYLPLSSILDTLDVMAYNKLNVFHWHLVDDPSFPYESFTFPELMRKGSYNPVTHIYTAQDVKEVIEYARLRGIRVLAEFDTPGHTLSWGPGIPGLLTPCYSGSEPSGTFGPVNPSLNNTYEFMSTFFLEVSSVFPDFYLHLGGDEVDFTCWKSNPEIQDFMRKKGFGEDFKQLESFYIQTLLDIVSSYGKGYVVWQEVFDNKVKIQPDTIIQVWREDIPVNYMKELELVTKAGFRALLSAPWYLNRISYGPDWKDFYIVEPLAFEGTPEQKALVIGGEACMWGEYVDNTNLVPRLWPRAGAVAERLWSNKLTSDLTFAYERLSHFRCELLRRGVQAQPLNVGFCEQEFEQT

SEQ ID NO: 1056 - protein, 556 aa, synthetic construct
MELCGLGLPRPPMLLALLLATLLAAMLALLTQVALVVQVAEAARAPSVSAKPGPALWPLPLSVKMTPNLLHLAPENFYISHSPNSTAGPSCTLLEEAFRRYHGYIFGFYKWHHEPAEFQAKTQVQQLLVSITLQSECDAFPNISSDESYTLLVKEPVAVLKANRVWGALRGLETFSQLVYQDSYGTFTINESTIIDSPRFSHRGILIDTSRHYLPVKIILKTLDAMAFNKFNVLHWHIVDDQSFPYQSITFPELSNKGSYSLSHVYTPNDVRMVIEYARLRGIRVLPEFDTPGHTLSWGKGQKDLLTPCYSRQNKLDSFGPINPTLNTTYSFLTTFFKEISEVFPDQFIHLGGDEVEFKCWESNPKIQDFMRQKGFGTDFKKLESFYIQKVLDIIATINKGSIVWQEVFDDKAKLAPGTIVEVWKDSAYPEELSRVTASGFPVILSAPWYLDLISYGQDWRKYYKVEPLDFGGTQKQKQLFIGGEACLWGEYVDATNLTPRLWPRASAVGERLWSSKDVRDMDDAYDRLTRHRCRMVERGIAAQPLYAGYCNHENM

SEQ ID NO: 1057 - protein, 536 aa, synthetic construct
MEFSSPSREECPKPLSRVSIMAGSLTGLLLLQAVSWASGARPCIPKSFGYSSVVCVCNATYCDSFDPPTFPALGTFSRYESTRSGRRMELSMGPIQANHTGTGLLLTLQPEQKFQKVKGFGGAMTDAAALNILALSPPAQNLLLKSYFSEEGIGYNIIRVPMASCDFSIRTYTYADTPDDFQLHNFSLPEEDTKLKIPLIHRALQLAQRPVSLLASPWTSPTWLKTNGAVNGKGSLKGQPGDIYHQTWARYFVKFLDAYAEHKLQFWAVTAENEPSAGLLSGYPFQCLGFTPEHQRDFIARDLGPTLANSTHHNVRLLMLDDQRLLLPHWAKVVLTDPEAAKYVHGIAVHWYLDFLAPAKATLGETHRLFPNTMLFASEACVGSKFWEQSVRLGSWDRGMQYSHSIITNLLYHVVGWTDWNLALNPEGGPNWVRNFVDSPIIVDITKDTFYKQPMFYHLGHFSKFIPEGSQRVGLVASQKNDLDAVALMHPDGSAVVVVLNRSSKDVPLTIKDPAVGFLETISPGYSIHTYLWRRQ

SEQ ID NO: 1058 - DNA, 1608 bp, synthetic construct
  source 1..1608: mol_type = other DNA
atggaattcagcagccccagcagagaggaatgccccaagcctctgagccgggtgtcaatcatggccggatctctgacaggactgctgctgcttcaggccgtgtcttgggcttctggcgctagaccttgcatccccaagagcttcggctacagcagcgtcgtgtgcgtgtgcaatgccacctactgcgacagcttcgaccctcctacctttcctgctctgggcaccttcagcagatacgagagcaccagatccggcagacggatggaactgagcatgggacccatccaggccaatcacacaggcactggcctgctgctgacactgcagcctgagcagaaattccagaaagtgaaaggcttcggcggagccatgacagatgccgccgctctgaatatcctggctctgtctccaccagctcagaacctgctgctcaagagctacttcagcgaggaaggcatcggctacaacatcatcagagtgcccatggccagctgcgacttcagcatcaggacctacacctacgccgacacacccgacgatttccagctgcacaacttcagcctgcctgaagaggacaccaagctgaagatccctctgatccacagagccctgcagctggcacaaagacccgtgtcactgctggcctctccatggacatctcccacctggctgaaaacaaatggcgccgtgaatggcaagggcagcctgaaaggccaacctggcgacatctaccaccagacctgggccagatacttcgtgaagttcctggacgcctatgccgagcacaagctgcagttttgggccgtgacagccgagaacgaaccttctgctggactgctgagcggctacccctttcagtgcctgggctttacacccgagcaccagcgggactttatcgcccgtgatctgggacccacactggccaatagcacccaccataatgtgcggctgctgatgctggacgaccagagactgcttctgccccactgggctaaagtggtgctgacagatcctgaggccgccaaatacgtgcacggaatcgccgtgcactggtatctggactttctggcccctgccaaggccacactgggagagacacacagactgttccccaacaccatgctgttcgccagcgaagcctgtgtgggcagcaagttttgggaacagagcgtgcggctcggcagctgggatagaggcatgcagtacagccacagcatcatcaccaacctgctgtaccacgtcgtcggctggaccgactggaatctggccctgaatcctgaaggcggccctaactgggtccgaaacttcgtggacagccccatcatcgtggacatcaccaaggacaccttctacaagcagcccatgttctaccacctgggacacttcagcaagttcatccccgagggctctcagcgcgttggactggtggcttcccagaagaacgatctggacgccgtggctctgatgcaccctgatggatctgctgtggtggtggtcctgaaccgcagcagcaaagatgtgcccctgaccatcaaggatcccgccgtgggattcctggaaacaatcagccctggctactccatccacacctacctgtggcgtagacag

SEQ ID NO: 1059 - DNA, 10467 bp, Homo sapiens
  source 1..10467: mol_type = genomic DNA
gcgcgcgctccctcctctcggagagagggctgtggtaaaagccgtccggaaaatggccgccgccgccgccgccgcgccgagcggaggaggaggaggaggcgaggaggagagactgctccataaaaatacagactcaccagttcctgctttgatgtgacatgtgactccccagaatacaccttgcttctgtagaccagctccaacaggattccatggtagctgggatgttagggctcagggaagaaaagtcagaagaccaggacctccagggcctcaaggacaaacccctcaagtttaaaaaggtgaagaaagataagaaagaagagaaagagggcaagcatgagcccgtgcagccatcagcccaccactctgctgagcccgcagaggcaggcaaagcagagacatcagaagggtcaggctccgccccggctgtgccggaagcttctgcctcccccaaacagcggcgctccatcatccgtgaccggggacccatgtatgatgaccccaccctgcctgaaggctggacacggaagcttaagcaaaggaaatctggccgctctgctgggaagtatgatgtgtatttgatcaatccccagggaaaagcctttcgctctaaagtggagttgattgcgtacttcgaaaaggtaggcgacacatccctggaccctaatgattttgacttcacggtaactgggagagggagcccctcccggcgagagcagaaaccacctaagaagcccaaatctcccaaagctccaggaactggcagaggccggggacgccccaaagggagcggcaccacgagacccaaggcggccacgtcagagggtgtgcaggtgaaaagggtcctggagaaaagtcctgggaagctccttgtcaagatgccttttcaaacttcgccagggggcaaggctgaggggggtggggccaccacatccacccaggtcatggtgatcaaacgccccggcaggaagcgaaaagctgaggccgaccctcaggccattcccaagaaacggggccgaaagccggggagtgtggtggcagccgctgccgccgaggccaaaaagaaagccgtgaaggagtcttctatccgatctgtgcaggagaccgtactccccatcaagaagcgcaagacccgggagacggtcagcatcgaggtcaaggaagtggtgaagcccctgctggtgtccaccctcggtgagaagagcgggaaaggactgaagacctgtaagagccctgggcggaaaagcaaggagagcagccccaaggggcgcagcagcagcgcctcctcaccccccaagaaggagcaccaccaccatcaccaccactcagagtccccaaaggcccccgtgccactgctcccacccctgcccccacctccacctgagcccgagagctccgaggaccccaccagcccccctgagccccaggacttgagcagcagcgtctgcaaagaggagaagatgcccagaggaggctcactggagagcgacggctgccccaaggagccagctaagactcagcccgcggttgccaccgccgccacggccgcagaaaagtacaaacaccgaggggagggagagcgcaaagacattgtttcatcctccatgccaaggccaaacagagaggagcctgtggacagccggacgcccgtgaccgagagagttagctgactttacacggagcggattgcaaagcaaaccaacaagaataaaggcagctgttgtctcttctccttatgggtagggctctgacaaagcttcccgattaactgaaataaaaaatatttttttttctttcagtaaacttagagtttcgtggcttcagggtgggagtagttggagcattggggatgtttttcttaccgacaagcacagtcaggttgaagacctaaccagggccagaagtagctttgcacttttctaaactaggctccttcaacaaggcttgctgcagatactactgaccagacaagctgttgaccaggcacctcccctcccgcccaaacctttcccccatgtggtcgttagagacagagcgacagagcagttgagaggacactcccgttttcggtgccatcagtgccccgtctacagctcccccagctccccccacctcccccactcccaaccacgttgggacagggaggtgtgaggcaggagagacagttggattctttagagaagatggatatgaccagtggctatggcctgtgcgatcccacccgtggtggctcaagtctggccccacaccagccccaatccaaaactggcaaggacgcttcacaggacaggaaagtggcacctgtctgctccagctctggcatggctaggaggggggagtcccttgaactactgggtgtagactggcctgaaccacaggagaggatggcccagggtgaggtggcatggtccattctcaagggacgtcctccaacgggtggcgctagaggccatggaggcagtaggacaaggtgcaggcaggctggcctggggtcaggccgggcagagcacagcggggtgagagggattcctaatcactcagagcagtctgtgacttagtggacaggggagggggcaaagggggaggagaagaaaatgttcttccagttactttccaattctcctttagggacagcttagaattatttgcactattgagtcttcatgttcccacttcaaaacaaacagatgctctgagagcaaactggcttgaattggtgacatttagtccctcaagccaccagatgtgacagtgttgagaactacctggatttgtatatatacctgcgcttgttttaaagtgggctcagcacatagggttcccacgaagctccgaaactctaagtgtttgctgcaattttataaggacttcctgattggtttctcttctccccttccatttctgccttttgttcatttcatcctttcacttctttcccttcctccatcctcctccttcctagttcatcccttctcttccaggcagccgcggtgcccaaccacacttgtcggctccagtccccagaactctgcctgccctttgtcctcctgctgccagtaccagccccaccctgttttgagccctgaggaggccttgggctctgctgagtccgacctggcctgtctgtgaagagcaagagagcagcaaggtcttgctctcctaggtagccccctcttccctggtaagaaaaagcaaaaggcatttcccaccctgaacaacgagccttttcacccttctactctagagaagtggactggaggagctgggcccgatttggtagttgaggaaagcacagaggcctcctgtggcctgccagtcatcgagtggcccaacaggggctccatgccagccgaccttgacctcactcagaagtccagagtctagcgtagtgcagcagggcagtagcggtaccaatgcagaactcccaagacccgagctgggaccagtacctgggtccccagcccttcctctgctcccccttttccctcggagttcttcttgaatggcaatgttttgcttttgctcgatgcagacagggggccagaacaccacacatttcactgtctgtctggtccatagctgtggtgtaggggcttagaggcatgggcttgctgtgggtttttaattgatcagttttcatgtgggatcccatctttttaacctctgttcaggaagtccttatctagctgcatatcttcatcatattggtatatccttttctgtgtttacagagatgtctcttatatctaaatctgtccaactgagaagtaccttatcaaagtagcaaatgagacagcagtcttatgcttccagaaacacccacaggcatgtcccatgtgagctgctgccatgaactgtcaagtgtgtgttgtcttgtgtatttcagttattgtccctggcttccttactatggtgtaatcatgaaggagtgaaacatcatagaaactgtctagcacttccttgccagtctttagtgatcaggaaccatagttgacagttccaatcagtagcttaagaaaaaaccgtgtttgtctcttctggaatggttagaagtgagggagtttgccccgttctgtttgtagagtctcatagttggactttctagcatatatgtgtccatttccttatgctgtaaaagcaagtcctgcaaccaaactcccatcagcccaatccctgatccctgatcccttccacctgctctgctgatgacccccccagcttcacttctgactcttccccaggaagggaaggggggtcagaagagagggtgagtcctccagaactcttcctccaaggacagaaggctcctgcccccatagtggcctcgaactcctggcactaccaaaggacacttatccacgagagcgcagcatccgaccaggttgtcactgagaagatgtttattttggtcagttgggtttttatgtattatacttagtcaaatgtaatgtggcttctggaatcattgtccagagctgcttccccgtcacctgggcgtcatctggtcctggtaagaggagtgcgtggcccaccaggcccccctgtcacccatgacagttcattcagggccgatggggcagtcgtggttgggaacacagcatttcaagcgtcactttatttcattcgggccccacctgcagctccctcaaagaggcagttgcccagcctctttcccttccagtttattccagagctgccagtggggcctgaggctccttagggttttctctctatttccccctttcttcctcattccctcgtctttcccaaaggcatcacgagtcagtcgcctttcagcaggcagccttggcggtttatcgccctggcaggcaggggccctgcagctctcatgctgcccctgccttggggtcaggttgacaggaggttggagggaaagccttaagctgcaggattctcaccagctgtgtccggcccagttttggggtgtgacctcaatttcaattttgtctgtacttgaacattatgaagatgggggcctctttcagtgaatttgtgaacagcagaattgaccgacagctttccagtacccatggggctaggtcattaaggccacatccacagtctcccccacccttgttccagttgttagttactacctcctctcctgacaatactgtatgtcgtcgagctccccccaggtctacccctcccggccctgcctgctggtgggcttgtcatagccagtgggattgccggtcttgacagctcagtgagctggagatacttggtcacagccaggcgctagcacagctcccttctgttgatgctgtattcccatatcaaaagacacaggggacacccagaaacgccacatcccccaatccatcagtgccaaactagccaacggccccagcttctcagctcgctggatggcggaagctgctactcgtgagcgccagtgcgggtgcagacaatcttctgttgggtggcatcattccaggcccgaagcatgaacagtgcacctgggacagggagcagccccaaattgtcacctgcttctctgcccagcttttcattgctgtgacagtgatggcgaaagagggtaataaccagacacaaactgccaagttgggtggagaaaggagtttctttagctgacagaatctctgaattttaaatcacttagtaagcggctcaagcccaggagggagcagagggatacgagcggagtcccctgcgcgggaccatctggaattggtttagcccaagtggagcctgacagccagaactctgtgtcccccgtctaaccacagctccttttccagagcattccagtcaggctctctgggctgactgggccaggggaggttacaggtaccagttctttaagaagatctttgggcatatacatttttagcctgtgtcattgccccaaatggattcctgtttcaagttcacacctgcagattctaggacctgtgtcctagacttcagggagtcagctgtttctagagttcctaccatggagtgggtctggaggacctgcccggtgggggggcagagccctgctccctccgggtcttcctactcttctctctgctctgacgggatttgttgattctctccattttggtgtctttctcttttagatattgtatcaatctttagaaaaggcatagtctacttgttataaatcgttaggatactgcctcccccagggtctaaaattacatattagaggggaaaagctgaacactgaagtcagttctcaacaatttagaaggaaaacctagaaaacatttggcagaaaattacatttcgatgtttttgaatgaatacgagcaagcttttacaacagtgctgatctaaaaatacttagcacttggcctgagatgcctggtgagcattacaggcaaggggaatctggaggtagccgacctgaggacatggcttctgaacctgtcttttgggagtggtatggaaggtggagcgttcaccagtgacctggaaggcccagcaccaccctccttcccactcttctcatcttgacagagcctgccccagcgctgacgtgtcaggaaaacacccagggaactaggaaggcacttctgcctgaggggcagcctgccttgcccactcctgctctgctcgcctcggatcagctgagccttctgagctggcctctcactgcctccccaaggccccctgcctgccctgtcaggaggcagaaggaagcaggtgtgagggcagtgcaaggagggagcacaacccccagctcccgctccgggctccgacttgtgcacaggcagagcccagaccctggaggaaatcctacctttgaattcaagaacatttggggaatttggaaatctctttgcccccaaacccccattctgtcctacctttaatcaggtcctgctcagcagtgagagcagatgaggtgaaaaggccaagaggtttggctcctgcccactgatagcccctctccccgcagtgtttgtgtgtcaagtggcaaagctgttcttcctggtgaccctgattatatccagtaacacatagactgtgcgcataggcctgctttgtctcctctatcctgggcttttgttttgctttttagttttgcttttagtttttctgtcccttttatttaacgcaccgactagacacacaaagcagttgaatttttatatatatatctgtatattgcacaattataaactcattttgcttgtggctccacacacacaaaaaaagacctgttaaaattatacctgttgcttaattacaatatttctgataaccatagcataggacaagggaaaataaaaaaagaaaaaaaagaaaaaaaaacgacaaatctgtctgctggtcacttcttctgtccaagcagattcgtggtcttttcctcgcttctttcaagggctttcctgtgccaggtgaaggaggctccaggcagcacccaggttttgcactcttgtttctcccgtgcttgtgaaagaggtcccaaggttctgggtgcaggagcgctcccttgacctgctgaagtccggaacgtagtcggcacagcctggtcgccttccacctctgggagctggagtccactggggtggcctgactcccccagtccccttcccgtgacctggtcagggtgagcccatgtggagtcagcctcgcaggcctccctgccagtagggtccgagtgtgtttcatccttcccactctgtcgagcctgggggctggagcggagacgggaggcctggcctgtctcggaacctgtgagctgcaccaggtagaacgccagggaccccagaatcatgtgcgtcagtccaaggggtcccctccaggagtagtgaagactccagaaatgtccctttcttctcccccatcctacgagtaattgcatttgcttttgtaattcttaatgagcaatatctgctagagagtttagctgtaacagttctttttgatcatctttttttaataattagaaacaccaaaaaaatccagaaacttgttcttccaaagcagagagcattataatcaccagggccaaaagcttccctccctgctgtcattgcttcttctgaggcctgaatccaaaagaaaaacagccataggccctttcagtggccgggctacccgtgagcccttcggaggaccagggctggggcagcctctgggcccacatccggggccagctccggcgtgtgttcagtgttagcagtgggtcatgatgctctttcccacccagcctgggataggggcagaggaggcgaggaggccgttgccgctgatgtttggccgtgaacaggtgggtgtctgcgtgcgtccacgtgcgtgttttctgactgacatgaaatcgacgcccgagttagcctcacccggtgacctctagccctgcccggatggagcggggcccacccggttcagtgtttctggggagctggacagtggagtgcaaaaggcttgcagaacttgaagcctgctccttcccttgctaccacggcctcctttccgtttgatttgtcactgcttcaatcaataacagccgctccagagtcagtagtcaatgaatatatgaccaaatatcaccaggactgttactcaatgtgtgccgagcccttgcccatgctgggctcccgtgtatctggacactgtaacgtgtgctgtgtttgctccccttccccttccttctttgccctttacttgtctttctggggtttttctgtttgggtttggtttggtttttatttctccttttgtgttccaaacatgaggttctctctactggtcctcttaactgtggtgttgaggcttatatttgtgtaatttttggtgggtgaaaggaattttgctaagtaaatctcttctgtgtttgaactgaagtctgtattgtaactatgtttaaagtaattgttccagagacaaatatttctagacactttttctttacaaacaaaagcattcggagggagggggatggtgactgagatgagaggggagagctgaacagatgacccctgcccagatcagccagaagccacccaaagcagtggagcccaggagtcccactccaagccagcaagccgaatagctgatgtgttgccactttccaagtcactgcaaaaccaggttttgttccgcccagtggattcttgttttgcttcccctccccccgagattattaccaccatcccgtgcttttaaggaaaggcaagattgatgtttccttgaggggagccaggaggggatgtgtgtgtgcagagctgaagagctggggagaatggggctgggcccacccaagcaggaggctgggacgctctgctgtgggcacaggtcaggctaatgttggcagatgcagctcttcctggacaggccaggtggtgggcattctctctccaaggtgtgccccgtgggcattactgtttaagacacttccgtcacatcccaccccatcctccagggctcaacactgtgacatctctattccccaccctccccttcccagggcaataaaatgaccatggagggggcttgcactctcttggctgtcacccgatcgccagcaaaacttagatgtgagaaaaccccttcccattccatggcgaaaacatctccttagaaaagccattaccctcattaggcatggttttgggctcccaaaacacctgacagcccctccctcctctgagaggcggagagtgctgactgtagtgaccattgcatgccgggtgcagcatctggaagagctaggcagggtgtctgccccctcctgagttgaagtcatgctcccctgtgccagcccagaggccgagagctatggacagcattgccagtaacacaggccaccctgtgcagaagggagctggctccagcctggaaacctgtctgaggttgggagaggtgcacttggggcacagggagaggccgggacacacttagctggagatgtctctaaaagccctgtatcgtattcaccttcagtttttgtgttttgggacaattactttagaaaataagtaggtcgttttaaaaacaaaaattattgattgcttttttgtagtgttcagaaaaaaggttctttgtgtatagccaaatgactgaaagcactgatatatttaaaaacaaaaggcaatttattaaggaaatttgtaccatttcagtaaacctgtctgaatgtacctgtatacgtttcaaaaacaccccccccccactgaatccctgtaacctatttattatataaagagtttgccttataaatttacataaaaatgtccgtttgtgtcttttgttgtaaaaatcaagtgattttttcataaggttcttttactattggaaaagatgggcagcacgcagttttattttatttttgtaagttttttaatacatgtgaaagcaaagaatactcagcatgcctttctaagtgacgcgtttgcaccttttgttgggaagtactgtatcctgtgctgttagcattctcgataaatctctctgtgaaagtga

SEQ ID NO: 1060 - DNA, 10343 bp, Homo sapiens
  source 1..10343: mol_type = genomic DNA
gcgcgcgctccctcctctcggagagagggctgtggtaaaagccgtccggaaaatggccgccgccgccgccgccgcgccgagcggaggaggaggaggaggcgaggaggagagactggaagaaaagtcagaagaccaggacctccagggcctcaaggacaaacccctcaagtttaaaaaggtgaagaaagataagaaagaagagaaagagggcaagcatgagcccgtgcagccatcagcccaccactctgctgagcccgcagaggcaggcaaagcagagacatcagaagggtcaggctccgccccggctgtgccggaagcttctgcctcccccaaacagcggcgctccatcatccgtgaccggggacccatgtatgatgaccccaccctgcctgaaggctggacacggaagcttaagcaaaggaaatctggccgctctgctgggaagtatgatgtgtatttgatcaatccccagggaaaagcctttcgctctaaagtggagttgattgcgtacttcgaaaaggtaggcgacacatccctggaccctaatgattttgacttcacggtaactgggagagggagcccctcccggcgagagcagaaaccacctaagaagcccaaatctcccaaagctccaggaactggcagaggccggggacgccccaaagggagcggcaccacgagacccaaggcggccacgtcagagggtgtgcaggtgaaaagggtcctggagaaaagtcctgggaagctccttgtcaagatgccttttcaaacttcgccagggggcaaggctgaggggggtggggccaccacatccacccaggtcatggtgatcaaacgccccggcaggaagcgaaaagctgaggccgaccctcaggccattcccaagaaacggggccgaaagccggggagtgtggtggcagccgctgccgccgaggccaaaaagaaagccgtgaaggagtcttctatccgatctgtgcaggagaccgtactccccatcaagaagcgcaagacccgggagacggtcagcatcgaggtcaaggaagtggtgaagcccctgctggtgtccaccctcggtgagaagagcgggaaaggactgaagacctgtaagagccctgggcggaaaagcaaggagagcagccccaaggggcgcagcagcagcgcctcctcaccccccaagaaggagcaccaccaccatcaccaccactcagagtccccaaaggcccccgtgccactgctcccacccctgcccccacctccacctgagcccgagagctccgaggaccccaccagcccccctgagccccaggacttgagcagcagcgtctgcaaagaggagaagatgcccagaggaggctcactggagagcgacggctgccccaaggagccagctaagactcagcccgcggttgccaccgccgccacggccgcagaaaagtacaaacaccgaggggagggagagcgcaaagacattgtttcatcctccatgccaaggccaaacagagaggagcctgtggacagccggacgcccgtgaccgagagagttagctgactttacacggagcggattgcaaagcaaaccaacaagaataaaggcagctgttgtctcttctccttatgggtagggctctgacaaagcttcccgattaactgaaataaaaaatatttttttttctttcagtaaacttagagtttcgtggcttcagggtgggagtagttggagcattggggatgtttttcttaccgacaagcacagtcaggttgaagacctaaccagggccagaagtagctttgcacttttctaaactaggctccttcaacaaggcttgctgcagatactactgaccagacaagctgttgaccaggcacctcccctcccgcccaaacctttcccccatgtggtcgttagagacagagcgacagagcagttgagaggacactcccgttttcggtgccatcagtgccccgtctacagctcccccagctccccccacctcccccactcccaaccacgttgggacagggaggtgtgaggcaggagagacagttggattctttagagaagatggatatgaccagtggctatggcctgtgcgatcccacccgtggtggctcaagtctggccccacaccagccccaatccaaaactggcaaggacgcttcacaggacaggaaagtggcacctgtctgctccagctctggcatggctaggaggggggagtcccttgaactactgggtgtagactggcctgaaccacaggagaggatggcccagggtgaggtggcatggtccattctcaagggacgtcctccaacgggtggcgctagaggccatggaggcagtaggacaaggtgcaggcaggctggcctggggtcaggccgggcagagcacagcggggtgagagggattcctaatcactcagagcagtctgtgacttagtggacaggggagggggcaaagggggaggagaagaaaatgttcttccagttactttccaattctcctttagggacagcttagaattatttgcactattgagtcttcatgttcccacttcaaaacaaacagatgctctgagagcaaactggcttgaattggtgacatttagtccctcaagccaccagatgtgacagtgttgagaactacctggatttgtatatatacctgcgcttgttttaaagtgggctcagcacatagggttcccacgaagctccgaaactctaagtgtttgctgcaattttataaggacttcctgattggtttctcttctccccttccatttctgccttttgttcatttcatcctttcacttctttcccttcctccatcctcctccttcctagttcatcccttctcttccaggcagccgcggtgcccaaccacacttgtcggctccagtccccagaactctgcctgccctttgtcctcctgctgccagtaccagccccaccctgttttgagccctgaggaggccttgggctctgctgagtccgacctggcctgtctgtgaagagcaagagagcagcaaggtcttgctctcctaggtagccccctcttccctggtaagaaaaagcaaaaggcatttcccaccctgaacaacgagccttttcacccttctactctagagaagtggactggaggagctgggcccgatttggtagttgaggaaagcacagaggcctcctgtggcctgccagtcatcgagtggcccaacaggggctccatgccagccgaccttgacctcactcagaagtccagagtctagcgtagtgcagcagggcagtagcggtaccaatgcagaactcccaagacccgagctgggaccagtacctgggtccccagcccttcctctgctcccccttttccctcggagttcttcttgaatggcaatgttttgcttttgctcgatgcagacagggggccagaacaccacacatttcactgtctgtctggtccatagctgtggtgtaggggcttagaggcatgggcttgctgtgggtttttaattgatcagttttcatgtgggatcccatctttttaacctctgttcaggaagtccttatctagctgcatatcttcatcatattggtatatccttttctgtgtttacagagatgtctcttatatctaaatctgtccaactgagaagtaccttatcaaagtagcaaatgagacagcagtcttatgcttccagaaacacccacaggcatgtcccatgtgagctgctgccatgaactgtcaagtgtgtgttgtcttgtgtatttcagttattgtccctggcttccttactatggtgtaatcatgaaggagtgaaacatcatagaaactgtctagcacttccttgccagtctttagtgatcaggaaccatagttgacagttccaatcagtagcttaagaaaaaaccgtgtttgtctcttctggaatggttagaagtgagggagtttgccccgttctgtttgtagagtctcatagttggactttctagcatatatgtgtccatttccttatgctgtaaaagcaagtcctgcaaccaaactcccatcagcccaatccctgatccctgatcccttccacctgctctgctgatgacccccccagcttcacttctgactcttccccaggaagggaaggggggtcagaagagagggtgagtcctccagaactcttcctccaaggacagaaggctcctgcccccatagtggcctcgaactcctggcactaccaaaggacacttatccacgagagcgcagcatccgaccaggttgtcactgagaagatgtttattttggtcagttgggtttttatgtattatacttagtcaaatgtaatgtggcttctggaatcattgtccagagctgcttccccgtcacctgggcgtcatctggtcctggtaagaggagtgcgtggcccaccaggcccccctgtcacccatgacagttcattcagggccgatggggcagtcgtggttgggaacacagcatttcaagcgtcactttatttcattcgggccccacctgcagctccctcaaagaggcagttgcccagcctctttcccttccagtttattccagagctgccagtggggcctgaggctccttagggttttctctctatttccccctttcttcctcattccctcgtctttcccaaaggcatcacgagtcagtcgcctttcagcaggcagccttggcggtttatcgccctggcaggcaggggccctgcagctctcatgctgcccctgccttggggtcaggttgacaggaggttggagggaaagccttaagctgcaggattctcaccagctgtgtccggcccagttttggggtgtgacctcaatttcaattttgtctgtacttgaacattatgaagatgggggcctctttcagtgaatttgtgaacagcagaattgaccgacagctttccagtacccatggggctaggtcattaaggccacatccacagtctcccccacccttgttccagttgttagttactacctcctctcctgacaatactgtatgtcgtcgagctccccccaggtctacccctcccggccctgcctgctggtgggcttgtcatagccagtgggattgccggtcttgacagctcagtgagctggagatacttggtcacagccaggcgctagcacagctcccttctgttgatgctgtattcccatatcaaaagacacaggggacacccagaaacgccacatcccccaatccatcagtgccaaactagccaacggccccagcttctcagctcgctggatggcggaagctgctactcgtgagcgccagtgcgggtgcagacaatcttctgttgggtggcatcattccaggcccgaagcatgaacagtgcacctgggacagggagcagccccaaattgtcacctgcttctctgcccagcttttcattgctgtgacagtgatggcgaaagagggtaataaccagacacaaactgccaagttgggtggagaaaggagtttctttagctgacagaatctctgaattttaaatcacttagtaagcggctcaagcccaggagggagcagagggatacgagcggagtcccctgcgcgggaccatctggaattggtttagcccaagtggagcctgacagccagaactctgtgtcccccgtctaaccacagctccttttccagagcattccagtcaggctctctgggctgactgggccaggggaggttacaggtaccagttctttaagaagatctttgggcatatacatttttagcctgtgtcattgccccaaatggattcctgtttcaagttcacacctgcagattctaggacctgtgtcctagacttcagggagtcagctgtttctagagttcctaccatggagtgggtctggaggacctgcccggtgggggggcagagccctgctccctccgggtcttcctactcttctctctgctctgacgggatttgttgattctctccattttggtgtctttctcttttagatattgtatcaatctttagaaaaggcatagtctacttgttataaatcgttaggatactgcctcccccagggtctaaaattacatattagaggggaaaagctgaacactgaagtcagttctcaacaatttagaaggaaaacctagaaaacatttggcagaaaattacatttcgatgtttttgaatgaatacgagcaagcttttacaacagtgctgatctaaaaatacttagcacttggcctgagatgcctggtgagcattacaggcaaggggaatctggaggtagccgacctgaggacatggcttctgaacctgtcttttgggagtggtatggaaggtggagcgttcaccagtgacctggaaggcccagcaccaccctccttcccactcttctcatcttgacagagcctgccccagcgctgacgtgtcaggaaaacacccagggaactaggaaggcacttctgcctgaggggcagcctgccttgcccactcctgctctgctcgcctcggatcagctgagccttctgagctggcctctcactgcctccccaaggccccctgcctgccctgtcaggaggcagaaggaagcaggtgtgagggcagtgcaaggagggagcacaacccccagctcccgctccgggctccgacttgtgcacaggcagagcccagaccctggaggaaatcctacctttgaattcaagaacatttggggaatttggaaatctctttgcccccaaacccccattctgtcctacctttaatcaggtcctgctcagcagtgagagcagatgaggtgaaaaggccaagaggtttggctcctgcccactgatagcccctctccccgcagtgtttgtgtgtcaagtggcaaagctgttcttcctggtgaccctgattatatccagtaacacatagactgtgcgcataggcctgctttgtctcctctatcctgggcttttgttttgctttttagttttgcttttagtttttctgtcccttttatttaacgcaccgactagacacacaaagcagttgaatttttatatatatatctgtatattgcacaattataaactcattttgcttgtggctccacacacacaaaaaaagacctgttaaaattatacctgttgcttaattacaatatttctgataaccatagcataggacaagggaaaataaaaaaagaaaaaaaagaaaaaaaaacgacaaatctgtctgctggtcacttcttctgtccaagcagattcgtggtcttttcctcgcttctttcaagggctttcctgtgccaggtgaaggaggctccaggcagcacccaggttttgcactcttgtttctcccgtgcttgtgaaagaggtcccaaggttctgggtgcaggagcgctcccttgacctgctgaagtccggaacgtagtcggcacagcctggtcgccttccacctctgggagctggagtccactggggtggcctgactcccccagtccccttcccgtgacctggtcagggtgagcccatgtggagtcagcctcgcaggcctccctgccagtagggtccgagtgtgtttcatccttcccactctgtcgagcctgggggctggagcggagacgggaggcctggcctgtctcggaacctgtgagctgcaccaggtagaacgccagggaccccagaatcatgtgcgtcagtccaaggggtcccctccaggagtagtgaagactccagaaatgtccctttcttctcccccatcctacgagtaattgcatttgcttttgtaattcttaatgagcaatatctgctagagagtttagctgtaacagttctttttgatcatctttttttaataattagaaacaccaaaaaaatccagaaacttgttcttccaaagcagagagcattataatcaccagggccaaaagcttccctccctgctgtcattgcttcttctgaggcctgaatccaaaagaaaaacagccataggccctttcagtggccgggctacccgtgagcccttcggaggaccagggctggggcagcctctgggcccacatccggggccagctccggcgtgtgttcagtgttagcagtgggtcatgatgctctttcccacccagcctgggataggggcagaggaggcgaggaggccgttgccgctgatgtttggccgtgaacaggtgggtgtctgcgtgcgtccacgtgcgtgttttctgactgacatgaaatcgacgcccgagttagcctcacccggtgacctctagccctgcccggatggagcggggcccacccggttcagtgtttctggggagctggacagtggagtgcaaaaggcttgcagaacttgaagcctgctccttcccttgctaccacggcctcctttccgtttgatttgtcactgcttcaatcaataacagccgctccagagtcagtagtcaatgaatatatgaccaaatatcaccaggactgttactcaatgtgtgccgagcccttgcccatgctgggctcccgtgtatctggacactgtaacgtgtgctgtgtttgctccccttccccttccttctttgccctttacttgtctttctggggtttttctgtttgggtttggtttggtttttatttctccttttgtgttccaaacatgaggttctctctactggtcctcttaactgtggtgttgaggcttatatttgtgtaatttttggtgggtgaaaggaattttgctaagtaaatctcttctgtgtttgaactgaagtctgtattgtaactatgtttaaagtaattgttccagagacaaatatttctagacactttttctttacaaacaaaagcattcggagggagggggatggtgactgagatgagaggggagagctgaacagatgacccctgcccagatcagccagaagccacccaaagcagtggagcccaggagtcccactccaagccagcaagccgaatagctgatgtgttgccactttccaagtcactgcaaaaccaggttttgttccgcccagtggattcttgttttgcttcccctccccccgagattattaccaccatcccgtgcttttaaggaaaggcaagattgatgtttccttgaggggagccaggaggggatgtgtgtgtgcagagctgaagagctggggagaatggggctgggcccacccaagcaggaggctgggacgctctgctgtgggcacaggtcaggctaatgttggcagatgcagctcttcctggacaggccaggtggtgggcattctctctccaaggtgtgccccgtgggcattactgtttaagacacttccgtcacatcccaccccatcctccagggctcaacactgtgacatctctattccccaccctccccttcccagggcaataaaatgaccatggagggggcttgcactctcttggctgtcacccgatcgccagcaaaacttagatgtgagaaaaccccttcccattccatggcgaaaacatctccttagaaaagccattaccctcattaggcatggttttgggctcccaaaacacctgacagcccctccctcctctgagaggcggagagtgctgactgtagtgaccattgcatgccgggtgcagcatctggaagagctaggcagggtgtctgccccctcctgagttgaagtcatgctcccctgtgccagcccagaggccgagagctatggacagcattgccagtaacacaggccaccctgtgcagaagggagctggctccagcctggaaacctgtctgaggttgggagaggtgcacttggggcacagggagaggccgggacacacttagctggagatgtctctaaaagccctgtatcgtattcaccttcagtttttgtgttttgggacaattactttagaaaataagtaggtcgttttaaaaacaaaaattattgattgcttttttgtagtgttcagaaaaaaggttctttgtgtatagccaaatgactgaaagcactgatatatttaaaaacaaaaggcaatttattaaggaaatttgtaccatttcagtaaacctgtctgaatgtacctgtatacgtttcaaaaacaccccccccccactgaatccctgtaacctatttattatataaagagtttgccttataaatttacataaaaatgtccgtttgtgtcttttgttgtaaaaatcaagtgattttttcataaggttcttttactattggaaaagatgggcagcacgcagttttattttatttttgtaagttttttaatacatgtgaaagcaaagaatactcagcatgcctttctaagtgacgcgtttgcaccttttgttgggaagtactgtatcctgtgctgttagcattctcgataaatctctctgtgaaagtga

SEQ ID NO: 1061 - DNA, 10635 bp, Homo sapiens
  source 1..10635: mol_type = genomic DNA
gcgcgcgctccctcctctcggagagagggctgtggtaaaagccgtccggaaaatggccgccgccgccgccgccgcgccgagcggaggaggaggaggaggcgaggaggagagactgctccataaaaatacagactcaccagttcctgctttgatgtgacatgtgactccccagaatacaccttgcttctgtagaccagctccaacaggattccatggtagctgggatgttagggctcagctgcaagatgggattcagatctgttctcaagcctgtcgttccaggacccaggagggagaagcagctgccaggggaagtctcttcgtaggcggaggtcaggagtccaagaggagtgagcagagtcacagaagcctcttaaagcctcttcttcccccatcccatcaacacggaagaaaagtcagaagaccaggacctccagggcctcaaggacaaacccctcaagtttaaaaaggtgaagaaagataagaaagaagagaaagagggcaagcatgagcccgtgcagccatcagcccaccactctgctgagcccgcagaggcaggcaaagcagagacatcagaagggtcaggctccgccccggctgtgccggaagcttctgcctcccccaaacagcggcgctccatcatccgtgaccggggacccatgtatgatgaccccaccctgcctgaaggctggacacggaagcttaagcaaaggaaatctggccgctctgctgggaagtatgatgtgtatttgatcaatccccagggaaaagcctttcgctctaaagtggagttgattgcgtacttcgaaaaggtaggcgacacatccctggaccctaatgattttgacttcacggtaactgggagagggagcccctcccggcgagagcagaaaccacctaagaagcccaaatctcccaaagctccaggaactggcagaggccggggacgccccaaagggagcggcaccacgagacccaaggcggccacgtcagagggtgtgcaggtgaaaagggtcctggagaaaagtcctgggaagctccttgtcaagatgccttttcaaacttcgccagggggcaaggctgaggggggtggggccaccacatccacccaggtcatggtgatcaaacgccccggcaggaagcgaaaagctgaggccgaccctcaggccattcccaagaaacggggccgaaagccggggagtgtggtggcagccgctgccgccgaggccaaaaagaaagccgtgaaggagtcttctatccgatctgtgcaggagaccgtactccccatcaagaagcgcaagacccgggagacggtcagcatcgaggtcaaggaagtggtgaagcccctgctggtgtccaccctcggtgagaagagcgggaaaggactgaagacctgtaagagccctgggcggaaaagcaaggagagcagccccaaggggcgcagcagcagcgcctcctcaccccccaagaaggagcaccaccaccatcaccaccactcagagtccccaaaggcccccgtgccactgctcccacccctgcccccacctccacctgagcccgagagctccgaggaccccaccagcccccctgagccccaggacttgagcagcagcgtctgcaaagaggagaagatgcccagaggaggctcactggagagcgacggctgccccaaggagccagctaagactcagcccgcggttgccaccgccgccacggccgcagaaaagtacaaacaccgaggggagggagagcgcaaagacattgtttcatcctccatgccaaggccaaacagagaggagcctgtggacagccggacgcccgtgaccgagagagttagctgactttacacggagcggattgcaaagcaaaccaacaagaataaaggcagctgttgtctcttctccttatgggtagggctctgacaaagcttcccgattaactgaaataaaaaatatttttttttctttcagtaaacttagagtttcgtggcttcagggtgggagtagttggagcattggggatgtttttcttaccgacaagcacagtcaggttgaagacctaaccagggccagaagtagctttgcacttttctaaactaggctccttcaacaaggcttgctgcagatactactgaccagacaagctgttgaccaggcacctcccctcccgcccaaacctttcccccatgtggtcgttagagacagagcgacagagcagttgagaggacactcccgttttcggtgccatcagtgccccgtctacagctcccccagctccccccacctcccccactcccaaccacgttgggacagggaggtgtgaggcaggagagacagttggattctttagagaagatggatatgaccagtggctatggcctgtgcgatcccacccgtggtggctcaagtctggccccacaccagccccaatccaaaactggcaaggacgcttcacaggacaggaaagtggcacctgtctgctccagctctggcatggctaggaggggggagtcccttgaactactgggtgtagactggcctgaaccacaggagaggatggcccagggtgaggtggcatggtccattctcaagggacgtcctccaacgggtggcgctagaggccatggaggcagtaggacaaggtgcaggcaggctggcctggggtcaggccgggcagagcacagcggggtgagagggattcctaatcactcagagcagtctgtgacttagtggacaggggagggggcaaagggggaggagaagaaaatgttcttccagttactttccaattctcctttagggacagcttagaattatttgcactattgagtcttcatgttcccacttcaaaacaaacagatgctctgagagcaaactggcttgaattggtgacatttagtccctcaagccaccagatgtgacagtgttgagaactacctggatttgtatatatacctgcgcttgttttaaagtgggctcagcacatagggttcccacgaagctccgaaactctaagtgtttgctgcaattttataaggacttcctgattggtttctcttctccccttccatttctgccttttgttcatttcatcctttcacttctttcccttcctccatcctcctccttcctagttcatcccttctcttccaggcagccgcggtgcccaaccacacttgtcggctccagtccccagaactctgcctgccctttgtcctcctgctgccagtaccagccccaccctgttttgagccctgaggaggccttgggctctgctgagtccgacctggcctgtctgtgaagagcaagagagcagcaaggtcttgctctcctaggtagccccctcttccctggtaagaaaaagcaaaaggcatttcccaccctgaacaacgagccttttcacccttctactctagagaagtggactggaggagctgggcccgatttggtagttgaggaaagcacagaggcctcctgtggcctgccagtcatcgagtggcccaacaggggctccatgccagccgaccttgacctcactcagaagtccagagtctagcgtagtgcagcagggcagtagcggtaccaatgcagaactcccaagacccgagctgggaccagtacctgggtccccagcccttcctctgctcccccttttccctcggagttcttcttgaatggcaatgttttgcttttgctcgatgcagacagggggccagaacaccacacatttcactgtctgtctggtccatagctgtggtgtaggggcttagaggcatgggcttgctgtgggtttttaattgatcagttttcatgtgggatcccatctttttaacctctgttcaggaagtccttatctagctgcatatcttcatcatattggtatatccttttctgtgtttacagagatgtctcttatatctaaatctgtccaactgagaagtaccttatcaaagtagcaaatgagacagcagtcttatgcttccagaaacacccacaggcatgtcccatgtgagctgctgccatgaactgtcaagtgtgtgttgtcttgtgtatttcagttattgtccctggcttccttactatggtgtaatcatgaaggagtgaaacatcatagaaactgtctagcacttccttgccagtctttagtgatcaggaaccatagttgacagttccaatcagtagcttaagaaaaaaccgtgtttgtctcttctggaatggttagaagtgagggagtttgccccgttctgtttgtagagtctcatagttggactttctagcatatatgtgtccatttccttatgctgtaaaagcaagtcctgcaaccaaactcccatcagcccaatccctgatccctgatcccttccacctgctctgctgatgacccccccagcttcacttctgactcttccccaggaagggaaggggggtcagaagagagggtgagtcctccagaactcttcctccaaggacagaaggctcctgcccccatagtggcctcgaactcctggcactaccaaaggacacttatccacgagagcgcagcatccgaccaggttgtcactgagaagatgtttattttggtcagttgggtttttatgtattatacttagtcaaatgtaatgtggcttctggaatcattgtccagagctgcttccccgtcacctgggcgtcatctggtcctggtaagaggagtgcgtggcccaccaggcccccctgtcacccatgacagttcattcagggccgatggggcagtcgtggttgggaacacagcatttcaagcgtcactttatttcattcgggccccacctgcagctccctcaaagaggcagttgcccagcctctttcccttccagtttattccagagctgccagtggggcctgaggctccttagggttttctctctatttccccctttcttcctcattccctcgtctttcccaaaggcatcacgagtcagtcgcctttcagcaggcagccttggcggtttatcgccctggcaggcaggggccctgcagctctcatgctgcccctgccttggggtcaggttgacaggaggttggagggaaagccttaagctgcaggattctcaccagctgtgtccggcccagttttggggtgtgacctcaatttcaattttgtctgtacttgaacattatgaagatgggggcctctttcagtgaatttgtgaacagcagaattgaccgacagctttccagtacccatggggctaggtcattaaggccacatccacagtctcccccacccttgttccagttgttagttactacctcctctcctgacaatactgtatgtcgtcgagctccccccaggtctacccctcccggccctgcctgctggtgggcttgtcatagccagtgggattgccggtcttgacagctcagtgagctggagatacttggtcacagccaggcgctagcacagctcccttctgttgatgctgtattcccatatcaaaagacacaggggacacccagaaacgccacatcccccaatccatcagtgccaaactagccaacggccccagcttctcagctcgctggatggcggaagctgctactcgtgagcgccagtgcgggtgcagacaatcttctgttgggtggcatcattccaggcccgaagcatgaacagtgcacctgggacagggagcagccccaaattgtcacctgcttctctgcccagcttttcattgctgtgacagtgatggcgaaagagggtaataaccagacacaaactgccaagttgggtggagaaaggagtttctttagctgacagaatctctgaattttaaatcacttagtaagcggctcaagcccaggagggagcagagggatacgagcggagtcccctgcgcgggaccatctggaattggtttagcccaagtggagcctgacagccagaactctgtgtcccccgtctaaccacagctccttttccagagcattccagtcaggctctctgggctgactgggccaggggaggttacaggtaccagttctttaagaagatctttgggcatatacatttttagcctgtgtcattgccccaaatggattcctgtttcaagttcacacctgcagattctaggacctgtgtcctagacttcagggagtcagctgtttctagagttcctaccatggagtgggtctggaggacctgcccggtgggggggcagagccctgctccctccgggtcttcctactcttctctctgctctgacgggatttgttgattctctccattttggtgtctttctcttttagatattgtatcaatctttagaaaaggcatagtctacttgttataaatcgttaggatactgcctcccccagggtctaaaattacatattagaggggaaaagctgaacactgaagtcagttctcaacaatttagaaggaaaacctagaaaacatttggcagaaaattacatttcgatgtttttgaatgaatacgagcaagcttttacaacagtgctgatctaaaaatacttagcacttggcctgagatgcctggtgagcattacaggcaaggggaatctggaggtagccgacctgaggacatggcttctgaacctgtcttttgggagtggtatggaaggtggagcgttcaccagtgacctggaaggcccagcaccaccctccttcccactcttctcatcttgacagagcctgccccagcgctgacgtgtcaggaaaacacccagggaactaggaaggcacttctgcctgaggggcagcctgccttgcccactcctgctctgctcgcctcggatcagctgagccttctgagctggcctctcactgcctccccaaggccccctgcctgccctgtcaggaggcagaaggaagcaggtgtgagggcagtgcaaggagggagcacaacccccagctcccgctccgggctccgacttgtgcacaggcagagcccagaccctggaggaaatcctacctttgaattcaagaacatttggggaatttggaaatctctttgcccccaaacccccattctgtcctacctttaatcaggtcctgctcagcagtgagagcagatgaggtgaaaaggccaagaggtttggctcctgcccactgatagcccctctccccgcagtgtttgtgtgtcaagtggcaaagctgttcttcctggtgaccctgattatatccagtaacacatagactgtgcgcataggcctgctttgtctcctctatcctgggcttttgttttgctttttagttttgcttttagtttttctgtcccttttatttaacgcaccgactagacacacaaagcagttgaatttttatatatatatctgtatattgcacaattataaactcattttgcttgtggctccacacacacaaaaaaagacctgttaaaattatacctgttgcttaattacaatatttctgataaccatagcataggacaagggaaaataaaaaaagaaaaaaaagaaaaaaaaacgacaaatctgtctgctggtcacttcttctgtccaagcagattcgtggtcttttcctcgcttctttcaagggctttcctgtgccaggtgaaggaggctccaggcagcacccaggttttgcactcttgtttctcccgtgcttgtgaaagaggtcccaaggttctgggtgcaggagcgctcccttgacctgctgaagtccggaacgtagtcggcacagcctggtcgccttccacctctgggagctggagtccactggggtggcctgactcccccagtccccttcccgtgacctggtcagggtgagcccatgtggagtcagcctcgcaggcctccctgccagtagggtccgagtgtgtttcatccttcccactctgtcgagcctgggggctggagcggagacgggaggcctggcctgtctcggaacctgtgagctgcaccaggtagaacgccagggaccccagaatcatgtgcgtcagtccaaggggtcccctccaggagtagtgaagactccagaaatgtccctttcttctcccccatcctacgagtaattgcatttgcttttgtaattcttaatgagcaatatctgctagagagtttagctgtaacagttctttttgatcatctttttttaataattagaaacaccaaaaaaatccagaaacttgttcttccaaagcagagagcattataatcaccagggccaaaagcttccctccctgctgtcattgcttcttctgaggcctgaatccaaaagaaaaacagccataggccctttcagtggccgggctacccgtgagcccttcggaggaccagggctggggcagcctctgggcccacatccggggccagctccggcgtgtgttcagtgttagcagtgggtcatgatgctctttcccacccagcctgggataggggcagaggaggcgaggaggccgttgccgctgatgtttggccgtgaacaggtgggtgtctgcgtgcgtccacgtgcgtgttttctgactgacatgaaatcgacgcccgagttagcctcacccggtgacctctagccctgcccggatggagcggggcccacccggttcagtgtttctggggagctggacagtggagtgcaaaaggcttgcagaacttgaagcctgctccttcccttgctaccacggcctcctttccgtttgatttgtcactgcttcaatcaataacagccgctccagagtcagtagtcaatgaatatatgaccaaatatcaccaggactgttactcaatgtgtgccgagcccttgcccatgctgggctcccgtgtatctggacactgtaacgtgtgctgtgtttgctccccttccccttccttctttgccctttacttgtctttctggggtttttctgtttgggtttggtttggtttttatttctccttttgtgttccaaacatgaggttctctctactggtcctcttaactgtggtgttgaggcttatatttgtgtaatttttggtgggtgaaaggaattttgctaagtaaatctcttctgtgtttgaactgaagtctgtattgtaactatgtttaaagtaattgttccagagacaaatatttctagacactttttctttacaaacaaaagcattcggagggagggggatggtgactgagatgagaggggagagctgaacagatgacccctgcccagatcagccagaagccacccaaagcagtggagcccaggagtcccactccaagccagcaagccgaatagctgatgtgttgccactttccaagtcactgcaaaaccaggttttgttccgcccagtggattcttgttttgcttcccctccccccgagattattaccaccatcccgtgcttttaaggaaaggcaagattgatgtttccttgaggggagccaggaggggatgtgtgtgtgcagagctgaagagctggggagaatggggctgggcccacccaagcaggaggctgggacgctctgctgtgggcacaggtcaggctaatgttggcagatgcagctcttcctggacaggccaggtggtgggcattctctctccaaggtgtgccccgtgggcattactgtttaagacacttccgtcacatcccaccccatcctccagggctcaacactgtgacatctctattccccaccctccccttcccagggcaataaaatgaccatggagggggcttgcactctcttggctgtcacccgatcgccagcaaaacttagatgtgagaaaaccccttcccattccatggcgaaaacatctccttagaaaagccattaccctcattaggcatggttttgggctcccaaaacacctgacagcccctccctcctctgagaggcggagagtgctgactgtagtgaccattgcatgccgggtgcagcatctggaagagctaggcagggtgtctgccccctcctgagttgaagtcatgctcccctgtgccagcccagaggccgagagctatggacagcattgccagtaacacaggccaccctgtgcagaagggagctggctccagcctggaaacctgtctgaggttgggagaggtgcacttggggcacagggagaggccgggacacacttagctggagatgtctctaaaagccctgtatcgtattcaccttcagtttttgtgttttgggacaattactttagaaaataagtaggtcgttttaaaaacaaaaattattgattgcttttttgtagtgttcagaaaaaaggttctttgtgtatagccaaatgactgaaagcactgatatatttaaaaacaaaaggcaatttattaaggaaatttgtaccatttcagtaaacctgtctgaatgtacctgtatacgtttcaaaaacaccccccccccactgaatccctgtaacctatttattatataaagagtttgccttataaatttacataaaaatgtccgtttgtgtcttttgttgtaaaaatcaagtgattttttcataaggttcttttactattggaaaagatgggcagcacgcagttttattttatttttgtaagttttttaatacatgtgaaagcaaagaatactcagcatgcctttctaagtgacgcgtttgcaccttttgttgggaagtactgtatcctgtgctgttagcattctcgataaatctctctgtgaaagtga

SEQ ID NO: 1062 - DNA, 10930 bp, Homo sapiens
  source 1..10930: mol_type = genomic DNA
gcgcgcgctccctcctctcggagagagggctgtggtaaaagccgtccggaaaatggccgccgccgccgccgccgcgccgagcggaggaggaggaggaggcgaggaggagagactgctccataaaaatacagactcaccagttcctgctttgatgtgacatgtgactccccagaatacaccttgcttctgtagaccagctccaacaggattccatggtagctgggatgttagggctcaggacccaggagggagaagcagctgccaggggaagtctcttcgtaggcggaggtcaggagtccaagaggagtgagcagagtcacagaagcctcttaaagcctcttcttcccccatcccatcaacacatctgctgcccaagaactcctttgtgattgaatttaaccagagttgatttctgttgcttgaaactcaggaccttgatgcagtgtgcagggtctgggcaaggaaattcataaaagaagagatacagatggccaatgaagataggaaaagagttctgcctgctggtaatcaaagagatgcaaacgagaacaaaaatgatgccttttcacctaccaaatttgtcaagattaaaaagaaagcaaagagccagcgtcagctgatgttcatacctgcacctgctcggtagcttgctaatgttctgcctgctccacacgccaggccagcctccacggcgcagccagggaagaaaagtcagaagaccaggacctccagggcctcaaggacaaacccctcaagtttaaaaaggtgaagaaagataagaaagaagagaaagagggcaagcatgagcccgtgcagccatcagcccaccactctgctgagcccgcagaggcaggcaaagcagagacatcagaagggtcaggctccgccccggctgtgccggaagcttctgcctcccccaaacagcggcgctccatcatccgtgaccggggacccatgtatgatgaccccaccctgcctgaaggctggacacggaagcttaagcaaaggaaatctggccgctctgctgggaagtatgatgtgtatttgatcaatccccagggaaaagcctttcgctctaaagtggagttgattgcgtacttcgaaaaggtaggcgacacatccctggaccctaatgattttgacttcacggtaactgggagagggagcccctcccggcgagagcagaaaccacctaagaagcccaaatctcccaaagctccaggaactggcagaggccggggacgccccaaagggagcggcaccacgagacccaaggcggccacgtcagagggtgtgcaggtgaaaagggtcctggagaaaagtcctgggaagctccttgtcaagatgccttttcaaacttcgccagggggcaaggctgaggggggtggggccaccacatccacccaggtcatggtgatcaaacgccccggcaggaagcgaaaagctgaggccgaccctcaggccattcccaagaaacggggccgaaagccggggagtgtggtggcagccgctgccgccgaggccaaaaagaaagccgtgaaggagtcttctatccgatctgtgcaggagaccgtactccccatcaagaagcgcaagacccgggagacggtcagcatcgaggtcaaggaagtggtgaagcccctgctggtgtccaccctcggtgagaagagcgggaaaggactgaagacctgtaagagccctgggcggaaaagcaaggagagcagccccaaggggcgcagcagcagcgcctcctcaccccccaagaaggagcaccaccaccatcaccaccactcagagtccccaaaggcccccgtgccactgctcccacccctgcccccacctccacctgagcccgagagctccgaggaccccaccagcccccctgagccccaggacttgagcagcagcgtctgcaaagaggagaagatgcccagaggaggctcactggagagcgacggctgccccaaggagccagctaagactcagcccgcggttgccaccgccgccacggccgcagaaaagtacaaacaccgaggggagggagagcgcaaagacattgtttcatcctccatgccaaggccaaacagagaggagcctgtggacagccggacgcccgtgaccgagagagttagctgactttacacggagcggattgcaaagcaaaccaacaagaataaaggcagctgttgtctcttctccttatgggtagggctctgacaaagcttcccgattaactgaaataaaaaatatttttttttctttcagtaaacttagagtttcgtggcttcagggtgggagtagttggagcattggggatgtttttcttaccgacaagcacagtcaggttgaagacctaaccagggccagaagtagctttgcacttttctaaactaggctccttcaacaaggcttgctgcagatactactgaccagacaagctgttgaccaggcacctcccctcccgcccaaacctttcccccatgtggtcgttagagacagagcgacagagcagttgagaggacactcccgttttcggtgccatcagtgccccgtctacagctcccccagctccccccacctcccccactcccaaccacgttgggacagggaggtgtgaggcaggagagacagttggattctttagagaagatggatatgaccagtggctatggcctgtgcgatcccacccgtggtggctcaagtctggccccacaccagccccaatccaaaactggcaaggacgcttcacaggacaggaaagtggcacctgtctgctccagctctggcatggctaggaggggggagtcccttgaactactgggtgtagactggcctgaaccacaggagaggatggcccagggtgaggtggcatggtccattctcaagggacgtcctccaacgggtggcgctagaggccatggaggcagtaggacaaggtgcaggcaggctggcctggggtcaggccgggcagagcacagcggggtgagagggattcctaatcactcagagcagtctgtgacttagtggacaggggagggggcaaagggggaggagaagaaaatgttcttccagttactttccaattctcctttagggacagcttagaattatttgcactattgagtcttcatgttcccacttcaaaacaaacagatgctctgagagcaaactggcttgaattggtgacatttagtccctcaagccaccagatgtgacagtgttgagaactacctggatttgtatatatacctgcgcttgttttaaagtgggctcagcacatagggttcccacgaagctccgaaactctaagtgtttgctgcaattttataaggacttcctgattggtttctcttctccccttccatttctgccttttgttcatttcatcctttcacttctttcccttcctccatcctcctccttcctagttcatcccttctcttccaggcagccgcggtgcccaaccacacttgtcggctccagtccccagaactctgcctgccctttgtcctcctgctgccagtaccagccccaccctgttttgagccctgaggaggccttgggctctgctgagtccgacctggcctgtctgtgaagagcaagagagcagcaaggtcttgctctcctaggtagccccctcttccctggtaagaaaaagcaaaaggcatttcccaccctgaacaacgagccttttcacccttctactctagagaagtggactggaggagctgggcccgatttggtagttgaggaaagcacagaggcctcctgtggcctgccagtcatcgagtggcccaacaggggctccatgccagccgaccttgacctcactcagaagtccagagtctagcgtagtgcagcagggcagtagcggtaccaatgcagaactcccaagacccgagctgggaccagtacctgggtccccagcccttcctctgctcccccttttccctcggagttcttcttgaatggcaatgttttgcttttgctcgatgcagacagggggccagaacaccacacatttcactgtctgtctggtccatagctgtggtgtaggggcttagaggcatgggcttgctgtgggtttttaattgatcagttttcatgtgggatcccatctttttaacctctgttcaggaagtccttatctagctgcatatcttcatcatattggtatatccttttctgtgtttacagagatgtctcttatatctaaatctgtccaactgagaagtaccttatcaaagtagcaaatgagacagcagtcttatgcttccagaaacacccacaggcatgtcccatgtgagctgctgccatgaactgtcaagtgtgtgttgtcttgtgtatttcagttattgtccctggcttccttactatggtgtaatcatgaaggagtgaaacatcatagaaactgtctagcacttccttgccagtctttagtgatcaggaaccatagttgacagttccaatcagtagcttaagaaaaaaccgtgtttgtctcttctggaatggttagaagtgagggagtttgccccgttctgtttgtagagtctcatagttggactttctagcatatatgtgtccatttccttatgctgtaaaagcaagtcctgcaaccaaactcccatcagcccaatccctgatccctgatcccttccacctgctctgctgatgacccccccagcttcacttctgactcttccccaggaagggaaggggggtcagaagagagggtgagtcctccagaactcttcctccaaggacagaaggctcctgcccccatagtggcctcgaactcctggcactaccaaaggacacttatccacgagagcgcagcatccgaccaggttgtcactgagaagatgtttattttggtcagttgggtttttatgtattatacttagtcaaatgtaatgtggcttctggaatcattgtccagagctgcttccccgtcacctgggcgtcatctggtcctggtaagaggagtgcgtggcccaccaggcccccctgtcacccatgacagttcattcagggccgatggggcagtcgtggttgggaacacagcatttcaagcgtcactttatttcattcgggccccacctgcagctccctcaaagaggcagttgcccagcctctttcccttccagtttattccagagctgccagtggggcctgaggctccttagggttttctctctatttccccctttcttcctcattccctcgtctttcccaaaggcatcacgagtcagtcgcctttcagcaggcagccttggcggtttatcgccctggcaggcaggggccctgcagctctcatgctgcccctgccttggggtcaggttgacaggaggttggagggaaagccttaagctgcaggattctcaccagctgtgtccggcccagttttggggtgtgacctcaatttcaattttgtctgtacttgaacattatgaagatgggggcctctttcagtgaatttgtgaacagcagaattgaccgacagctttccagtacccatggggctaggtcattaaggccacatccacagtctcccccacccttgttccagttgttagttactacctcctctcctgacaatactgtatgtcgtcgagctccccccaggtctacccctcccggccctgcctgctggtgggcttgtcatagccagtgggattgccggtcttgacagctcagtgagctggagatacttggtcacagccaggcgctagcacagctcccttctgttgatgctgtattcccatatcaaaagacacaggggacacccagaaacgccacatcccccaatccatcagtgccaaactagccaacggccccagcttctcagctcgctggatggcggaagctgctactcgtgagcgccagtgcgggtgcagacaatcttctgttgggtggcatcattccaggcccgaagcatgaacagtgcacctgggacagggagcagccccaaattgtcacctgcttctctgcccagcttttcattgctgtgacagtgatggcgaaagagggtaataaccagacacaaactgccaagttgggtggagaaaggagtttctttagctgacagaatctctgaattttaaatcacttagtaagcggctcaagcccaggagggagcagagggatacgagcggagtcccctgcgcgggaccatctggaattggtttagcccaagtggagcctgacagccagaactctgtgtcccccgtctaaccacagctccttttccagagcattccagtcaggctctctgggctgactgggccaggggaggttacaggtaccagttctttaagaagatctttgggcatatacatttttagcctgtgtcattgccccaaatggattcctgtttcaagttcacacctgcagattctaggacctgtgtcctagacttcagggagtcagctgtttctagagttcctaccatggagtgggtctggaggacctgcccggtgggggggcagagccctgctccctccgggtcttcctactcttctctctgctctgacgggatttgttgattctctccattttggtgtctttctcttttagatattgtatcaatctttagaaaaggcatagtctacttgttataaatcgttaggatactgcctcccccagggtctaaaattacatattagaggggaaaagctgaacactgaagtcagttctcaacaatttagaaggaaaacctagaaaacatttggcagaaaattacatttcgatgtttttgaatgaatacgagcaagcttttacaacagtgctgatctaaaaatacttagcacttggcctgagatgcctggtgagcattacaggcaaggggaatctggaggtagccgacctgaggacatggcttctgaacctgtcttttgggagtggtatggaaggtggagcgttcaccagtgacctggaaggcccagcaccaccctccttcccactcttctcatcttgacagagcctgccccagcgctgacgtgtcaggaaaacacccagggaactaggaaggcacttctgcctgaggggcagcctgccttgcccactcctgctctgctcgcctcggatcagctgagccttctgagctggcctctcactgcctccccaaggccccctgcctgccctgtcaggaggcagaaggaagcaggtgtgagggcagtgcaaggagggagcacaacccccagctcccgctccgggctccgacttgtgcacaggcagagcccagaccctggaggaaatcctacctttgaattcaagaacatttggggaatttggaaatctctttgcccccaaacccccattctgtcctacctttaatcaggtcctgctcagcagtgagagcagatgaggtgaaaaggccaagaggtttggctcctgcccactgatagcccctctccccgcagtgtttgtgtgtcaagtggcaaagctgttcttcctggtgaccctgattatatccagtaacacatagactgtgcgcataggcctgctttgtctcctctatcctgggcttttgttttgctttttagttttgcttttagtttttctgtcccttttatttaacgcaccgactagacacacaaagcagttgaatttttatatatatatctgtatattgcacaattataaactcattttgcttgtggctccacacacacaaaaaaagacctgttaaaattatacctgttgcttaattacaatatttctgataaccatagcataggacaagggaaaataaaaaaagaaaaaaaagaaaaaaaaacgacaaatctgtctgctggtcacttcttctgtccaagcagattcgtggtcttttcctcgcttctttcaagggctttcctgtgccaggtgaaggaggctccaggcagcacccaggttttgcactcttgtttctcccgtgcttgtgaaagaggtcccaaggttctgggtgcaggagcgctcccttgacctgctgaagtccggaacgtagtcggcacagcctggtcgccttccacctctgggagctggagtccactggggtggcctgactcccccagtccccttcccgtgacctggtcagggtgagcccatgtggagtcagcctcgcaggcctccctgccagtagggtccgagtgtgtttcatccttcccactctgtcgagcctgggggctggagcggagacgggaggcctggcctgtctcggaacctgtgagctgcaccaggtagaacgccagggaccccagaatcatgtgcgtcagtccaaggggtcccctccaggagtagtgaagactccagaaatgtccctttcttctcccccatcctacgagtaattgcatttgcttttgtaattcttaatgagcaatatctgctagagagtttagctgtaacagttctttttgatcatctttttttaataattagaaacaccaaaaaaatccagaaacttgttcttccaaagcagagagcattataatcaccagggccaaaagcttccctccctgctgtcattgcttcttctgaggcctgaatccaaaagaaaaacagccataggccctttcagtggccgggctacccgtgagcccttcggaggaccagggctggggcagcctctgggcccacatccggggccagctccggcgtgtgttcagtgttagcagtgggtcatgatgctctttcccacccagcctgggataggggcagaggaggcgaggaggccgttgccgctgatgtttggccgtgaacaggtgggtgtctgcgtgcgtccacgtgcgtgttttctgactgacatgaaatcgacgcccgagttagcctcacccggtgacctctagccctgcccggatggagcggggcccacccggttcagtgtttctggggagctggacagtggagtgcaaaaggcttgcagaacttgaagcctgctccttcccttgctaccacggcctcctttccgtttgatttgtcactgcttcaatcaataacagccgctccagagtcagtagtcaatgaatatatgaccaaatatcaccaggactgttactcaatgtgtgccgagcccttgcccatgctgggctcccgtgtatctggacactgtaacgtgtgctgtgtttgctccccttccccttccttctttgccctttacttgtctttctggggtttttctgtttgggtttggtttggtttttatttctccttttgtgttccaaacatgaggttctctctactggtcctcttaactgtggtgttgaggcttatatttgtgtaatttttggtgggtgaaaggaattttgctaagtaaatctcttctgtgtttgaactgaagtctgtattgtaactatgtttaaagtaattgttccagagacaaatatttctagacactttttctttacaaacaaaagcattcggagggagggggatggtgactgagatgagaggggagagctgaacagatgacccctgcccagatcagccagaagccacccaaagcagtggagcccaggagtcccactccaagccagcaagccgaatagctgatgtgttgccactttccaagtcactgcaaaaccaggttttgttccgcccagtggattcttgttttgcttcccctccccccgagattattaccaccatcccgtgcttttaaggaaaggcaagattgatgtttccttgaggggagccaggaggggatgtgtgtgtgcagagctgaagagctggggagaatggggctgggcccacccaagcaggaggctgggacgctctgctgtgggcacaggtcaggctaatgttggcagatgcagctcttcctggacaggccaggtggtgggcattctctctccaaggtgtgccccgtgggcattactgtttaagacacttccgtcacatcccaccccatcctccagggctcaacactgtgacatctctattccccaccctccccttcccagggcaataaaatgaccatggagggggcttgcactctcttggctgtcacccgatcgccagcaaaacttagatgtgagaaaaccccttcccattccatggcgaaaacatctccttagaaaagccattaccctcattaggcatggttttgggctcccaaaacacctgacagcccctccctcctctgagaggcggagagtgctgactgtagtgaccattgcatgccgggtgcagcatctggaagagctaggcagggtgtctgccccctcctgagttgaagtcatgctcccctgtgccagcccagaggccgagagctatggacagcattgccagtaacacaggccaccctgtgcagaagggagctggctccagcctggaaacctgtctgaggttgggagaggtgcacttggggcacagggagaggccgggacacacttagctggagatgtctctaaaagccctgtatcgtattcaccttcagtttttgtgttttgggacaattactttagaaaataagtaggtcgttttaaaaacaaaaattattgattgcttttttgtagtgttcagaaaaaaggttctttgtgtatagccaaatgactgaaagcactgatatatttaaaaacaaaaggcaatttattaaggaaatttgtaccatttcagtaaacctgtctgaatgtacctgtatacgtttcaaaaacaccccccccccactgaatccctgtaacctatttattatataaagagtttgccttataaatttacataaaaatgtccgtttgtgtcttttgttgtaaaaatcaagtgattttttcataaggttcttttactattggaaaagatgggcagcacgcagttttattttatttttgtaagttttttaatacatgtgaaagcaaagaatactcagcatgcctttctaagtgacgcgtttgcaccttttgttgggaagtactgtatcctgtgctgttagcattctcgataaatctctctgtgaaagtga

SEQ ID NO: 1063 - DNA, 10579 bp, Homo sapiens
  source 1..10579: mol_type = genomic DNA
gcgcgcgctccctcctctcggagagagggctgtggtaaaagccgtccggaaaatggccgccgccgccgccgccgcgccgagcggaggaggaggaggaggcgaggaggagagactgctccataaaaatacagactcaccagttcctgctttgatgtgacatgtgactccccagaatacaccttgcttctgtagaccagctccaacaggattccatggtagctgggatgttagggctcagcactgagctagcctctccttgctagaagcttacggtcgaaggtctccagccatcagaagaagcacgtggagcgctgcgtccgtgttgtggttattcatccagcatgtgttgaggaagaaaagtcagaagaccaggacctccagggcctcaaggacaaacccctcaagtttaaaaaggtgaagaaagataagaaagaagagaaagagggcaagcatgagcccgtgcagccatcagcccaccactctgctgagcccgcagaggcaggcaaagcagagacatcagaagggtcaggctccgccccggctgtgccggaagcttctgcctcccccaaacagcggcgctccatcatccgtgaccggggacccatgtatgatgaccccaccctgcctgaaggctggacacggaagcttaagcaaaggaaatctggccgctctgctgggaagtatgatgtgtatttgatcaatccccagggaaaagcctttcgctctaaagtggagttgattgcgtacttcgaaaaggtaggcgacacatccctggaccctaatgattttgacttcacggtaactgggagagggagcccctcccggcgagagcagaaaccacctaagaagcccaaatctcccaaagctccaggaactggcagaggccggggacgccccaaagggagcggcaccacgagacccaaggcggccacgtcagagggtgtgcaggtgaaaagggtcctggagaaaagtcctgggaagctccttgtcaagatgccttttcaaacttcgccagggggcaaggctgaggggggtggggccaccacatccacccaggtcatggtgatcaaacgccccggcaggaagcgaaaagctgaggccgaccctcaggccattcccaagaaacggggccgaaagccggggagtgtggtggcagccgctgccgccgaggccaaaaagaaagccgtgaaggagtcttctatccgatctgtgcaggagaccgtactccccatcaagaagcgcaagacccgggagacggtcagcatcgaggtcaaggaagtggtgaagcccctgctggtgtccaccctcggtgagaagagcgggaaaggactgaagacctgtaagagccctgggcggaaaagcaaggagagcagccccaaggggcgcagcagcagcgcctcctcaccccccaagaaggagcaccaccaccatcaccaccactcagagtccccaaaggcccccgtgccactgctcccacccctgcccccacctccacctgagcccgagagctccgaggaccccaccagcccccctgagccccaggacttgagcagcagcgtctgcaaagaggagaagatgcccagaggaggctcactggagagcgacggctgccccaaggagccagctaagactcagcccgcggttgccaccgccgccacggccgcagaaaagtacaaacaccgaggggagggagagcgcaaagacattgtttcatcctccatgccaaggccaaacagagaggagcctgtggacagccggacgcccgtgaccgagagagttagctgactttacacggagcggattgcaaagcaaaccaacaagaataaaggcagctgttgtctcttctccttatgggtagggctctgacaaagcttcccgattaactgaaataaaaaatatttttttttctttcagtaaacttagagtttcgtggcttcagggtgggagtagttggagcattggggatgtttttcttaccgacaagcacagtcaggttgaagacctaaccagggccagaagtagctttgcacttttctaaactaggctccttcaacaaggcttgctgcagatactactgaccagacaagctgttgaccaggcacctcccctcccgcccaaacctttcccccatgtggtcgttagagacagagcgacagagcagttgagaggacactcccgttttcggtgccatcagtgccccgtctacagctcccccagctccccccacctcccccactcccaaccacgttgggacagggaggtgtgaggcaggagagacagttggattctttagagaagatggatatgaccagtggctatggcctgtgcgatcccacccgtggtggctcaagtctggccccacaccagccccaatccaaaactggcaaggacgcttcacaggacaggaaagtggcacctgtctgctccagctctggcatggctaggaggggggagtcccttgaactactgggtgtagactggcctgaaccacaggagaggatggcccagggtgaggtggcatggtccattctcaagggacgtcctccaacgggtggcgctagaggccatggaggcagtaggacaaggtgcaggcaggctggcctggggtcaggccgggcagagcacagcggggtgagagggattcctaatcactcagagcagtctgtgacttagtggacaggggagggggcaaagggggaggagaagaaaatgttcttccagttactttccaattctcctttagggacagcttagaattatttgcactattgagtcttcatgttcccacttcaaaacaaacagatgctctgagagcaaactggcttgaattggtgacatttagtccctcaagccaccagatgtgacagtgttgagaactacctggatttgtatatatacctgcgcttgttttaaagtgggctcagcacatagggttcccacgaagctccgaaactctaagtgtttgctgcaattttataaggacttcctgattggtttctcttctccccttccatttctgccttttgttcatttcatcctttcacttctttcccttcctccatcctcctccttcctagttcatcccttctcttccaggcagccgcggtgcccaaccacacttgtcggctccagtccccagaactctgcctgccctttgtcctcctgctgccagtaccagccccaccctgttttgagccctgaggaggccttgggctctgctgagtccgacctggcctgtctgtgaagagcaagagagcagcaaggtcttgctctcctaggtagccccctcttccctggtaagaaaaagcaaaaggcatttcccaccctgaacaacgagccttttcacccttctactctagagaagtggactggaggagctgggcccgatttggtagttgaggaaagcacagaggcctcctgtggcctgccagtcatcgagtggcccaacaggggctccatgccagccgaccttgacctcactcagaagtccagagtctagcgtagtgcagcagggcagtagcggtaccaatgcagaactcccaagacccgagctgggaccagtacctgggtccccagcccttcctctgctcccccttttccctcggagttcttcttgaatggcaatgttttgcttttgctcgatgcagacagggggccagaacaccacacatttcactgtctgtctggtccatagctgtggtgtaggggcttagaggcatgggcttgctgtgggtttttaattgatcagttttcatgtgggatcccatctttttaacctctgttcaggaagtccttatctagctgcatatcttcatcatattggtatatccttttctgtgtttacagagatgtctcttatatctaaatctgtccaactgagaagtaccttatcaaagtagcaaatgagacagcagtcttatgcttccagaaacacccacaggcatgtcccatgtgagctgctgccatgaactgtcaagtgtgtgttgtcttgtgtatttcagttattgtccctggcttccttactatggtgtaatcatgaaggagtgaaacatcatagaaactgtctagcacttccttgccagtctttagtgatcaggaaccatagttgacagttccaatcagtagcttaagaaaaaaccgtgtttgtctcttctggaatggttagaagtgagggagtttgccccgttctgtttgtagagtctcatagttggactttctagcatatatgtgtccatttccttatgctgtaaaagcaagtcctgcaaccaaactcccatcagcccaatccctgatccctgatcccttccacctgctctgctgatgacccccccagcttcacttctgactcttccccaggaagggaaggggggtcagaagagagggtgagtcctccagaactcttcctccaaggacagaaggctcctgcccccatagtggcctcgaactcctggcactaccaaaggacacttatccacgagagcgcagcatccgaccaggttgtcactgagaagatgtttattttggtcagttgggtttttatgtattatacttagtcaaatgtaatgtggcttctggaatcattgtccagagctgcttccccgtcacctgggcgtcatctggtcctggtaagaggagtgcgtggcccaccaggcccccctgtcacccatgacagttcattcagggccgatggggcagtcgtggttgggaacacagcatttcaagcgtcactttatttcattcgggccccacctgcagctccctcaaagaggcagttgcccagcctctttcccttccagtttattccagagctgccagtggggcctgaggctccttagggttttctctctatttccccctttcttcctcattccctcgtctttcccaaaggcatcacgagtcagtcgcctttcagcaggcagccttggcggtttatcgccctggcaggcaggggccctgcagctctcatgctgcccctgccttggggtcaggttgacaggaggttggagggaaagccttaagctgcaggattctcaccagctgtgtccggcccagttttggggtgtgacctcaatttcaattttgtctgtacttgaacattatgaagatgggggcctctttcagtgaatttgtgaacagcagaattgaccgacagctttccagtacccatggggctaggtcattaaggccacatccacagtctcccccacccttgttccagttgttagttactacctcctctcctgacaatactgtatgtcgtcgagctccccccaggtctacccctcccggccctgcctgctggtgggcttgtcatagccagtgggattgccggtcttgacagctcagtgagctggagatacttggtcacagccaggcgctagcacagctcccttctgttgatgctgtattcccatatcaaaagacacaggggacacccagaaacgccacatcccccaatccatcagtgccaaactagccaacggccccagcttctcagctcgctggatggcggaagctgctactcgtgagcgccagtgcgggtgcagacaatcttctgttgggtggcatcattccaggcccgaagcatgaacagtgcacctgggacagggagcagccccaaattgtcacctgcttctctgcccagcttttcattgctgtgacagtgatggcgaaagagggtaataaccagacacaaactgccaagttgggtggagaaaggagtttctttagctgacagaatctctgaattttaaatcacttagtaagcggctcaagcccaggagggagcagagggatacgagcggagtcccctgcgcgggaccatctggaattggtttagcccaagtggagcctgacagccagaactctgtgtcccccgtctaaccacagctccttttccagagcattccagtcaggctctctgggctgactgggccaggggaggttacaggtaccagttctttaagaagatctttgggcatatacatttttagcctgtgtcattgccccaaatggattcctgtttcaagttcacacctgcagattctaggacctgtgtcctagacttcagggagtcagctgtttctagagttcctaccatggagtgggtctggaggacctgcccggtgggggggcagagccctgctccctccgggtcttcctactcttctctctgctctgacgggatttgttgattctctccattttggtgtctttctcttttagatattgtatcaatctttagaaaaggcatagtctacttgttataaatcgttaggatactgcctcccccagggtctaaaattacatattagaggggaaaagctgaacactgaagtcagttctcaacaatttagaaggaaaacctagaaaacatttggcagaaaattacatttcgatgtttttgaatgaatacgagcaagcttttacaacagtgctgatctaaaaatacttagcacttggcctgagatgcctggtgagcattacaggcaaggggaatctggaggtagccgacctgaggacatggcttctgaacctgtcttttgggagtggtatggaaggtggagcgttcaccagtgacctggaaggcccagcaccaccctccttcccactcttctcatcttgacagagcctgccccagcgctgacgtgtcaggaaaacacccagggaactaggaaggcacttctgcctgaggggcagcctgccttgcccactcctgctctgctcgcctcggatcagctgagccttctgagctggcctctcactgcctccccaaggccccctgcctgccctgtcaggaggcagaaggaagcaggtgtgagggcagtgcaaggagggagcacaacccccagctcccgctccgggctccgacttgtgcacaggcagagcccagaccctggaggaaatcctacctttgaattcaagaacatttggggaatttggaaatctctttgcccccaaacccccattctgtcctacctttaatcaggtcctgctcagcagtgagagcagatgaggtgaaaaggccaagaggtttggctcctgcccactgatagcccctctccccgcagtgtttgtgtgtcaagtggcaaagctgttcttcctggtgaccctgattatatccagtaacacatagactgtgcgcataggcctgctttgtctcctctatcctgggcttttgttttgctttttagttttgcttttagtttttctgtcccttttatttaacgcaccgactagacacacaaagcagttgaatttttatatatatatctgtatattgcacaattataaactcattttgcttgtggctccacacacacaaaaaaagacctgttaaaattatacctgttgcttaattacaatatttctgataaccatagcataggacaagggaaaataaaaaaagaaaaaaaagaaaaaaaaacgacaaatctgtctgctggtcacttcttctgtccaagcagattcgtggtcttttcctcgcttctttcaagggctttcctgtgccaggtgaaggaggctccaggcagcacccaggttttgcactcttgtttctcccgtgcttgtgaaagaggtcccaaggttctgggtgcaggagcgctcccttgacctgctgaagtccggaacgtagtcggcacagcctggtcgccttccacctctgggagctggagtccactggggtggcctgactcccccagtccccttcccgtgacctggtcagggtgagcccatgtggagtcagcctcgcaggcctccctgccagtagggtccgagtgtgtttcatccttcccactctgtcgagcctgggggctggagcggagacgggaggcctggcctgtctcggaacctgtgagctgcaccaggtagaacgccagggaccccagaatcatgtgcgtcagtccaaggggtcccctccaggagtagtgaagactccagaaatgtccctttcttctcccccatcctacgagtaattgcatttgcttttgtaattcttaatgagcaatatctgctagagagtttagctgtaacagttctttttgatcatctttttttaataattagaaacaccaaaaaaatccagaaacttgttcttccaaagcagagagcattataatcaccagggccaaaagcttccctccctgctgtcattgcttcttctgaggcctgaatccaaaagaaaaacagccataggccctttcagtggccgggctacccgtgagcccttcggaggaccagggctggggcagcctctgggcccacatccggggccagctccggcgtgtgttcagtgttagcagtgggtcatgatgctctttcccacccagcctgggataggggcagaggaggcgaggaggccgttgccgctgatgtttggccgtgaacaggtgggtgtctgcgtgcgtccacgtgcgtgttttctgactgacatgaaatcgacgcccgagttagcctcacccggtgacctctagccctgcccggatggagcggggcccacccggttcagtgtttctggggagctggacagtggagtgcaaaaggcttgcagaacttgaagcctgctccttcccttgctaccacggcctcctttccgtttgatttgtcactgcttcaatcaataacagccgctccagagtcagtagtcaatgaatatatgaccaaatatcaccaggactgttactcaatgtgtgccgagcccttgcccatgctgggctcccgtgtatctggacactgtaacgtgtgctgtgtttgctccccttccccttccttctttgccctttacttgtctttctggggtttttctgtttgggtttggtttggtttttatttctccttttgtgttccaaacatgaggttctctctactggtcctcttaactgtggtgttgaggcttatatttgtgtaatttttggtgggtgaaaggaattttgctaagtaaatctcttctgtgtttgaactgaagtctgtattgtaactatgtttaaagtaattgttccagagacaaatatttctagacactttttctttacaaacaaaagcattcggagggagggggatggtgactgagatgagaggggagagctgaacagatgacccctgcccagatcagccagaagccacccaaagcagtggagcccaggagtcccactccaagccagcaagccgaatagctgatgtgttgccactttccaagtcactgcaaaaccaggttttgttccgcccagtggattcttgttttgcttcccctccccccgagattattaccaccatcccgtgcttttaaggaaaggcaagattgatgtttccttgaggggagccaggaggggatgtgtgtgtgcagagctgaagagctggggagaatggggctgggcccacccaagcaggaggctgggacgctctgctgtgggcacaggtcaggctaatgttggcagatgcagctcttcctggacaggccaggtggtgggcattctctctccaaggtgtgccccgtgggcattactgtttaagacacttccgtcacatcccaccccatcctccagggctcaacactgtgacatctctattccccaccctccccttcccagggcaataaaatgaccatggagggggcttgcactctcttggctgtcacccgatcgccagcaaaacttagatgtgagaaaaccccttcccattccatggcgaaaacatctccttagaaaagccattaccctcattaggcatggttttgggctcccaaaacacctgacagcccctccctcctctgagaggcggagagtgctgactgtagtgaccattgcatgccgggtgcagcatctggaagagctaggcagggtgtctgccccctcctgagttgaagtcatgctcccctgtgccagcccagaggccgagagctatggacagcattgccagtaacacaggccaccctgtgcagaagggagctggctccagcctggaaacctgtctgaggttgggagaggtgcacttggggcacagggagaggccgggacacacttagctggagatgtctctaaaagccctgtatcgtattcaccttcagtttttgtgttttgggacaattactttagaaaataagtaggtcgttttaaaaacaaaaattattgattgcttttttgtagtgttcagaaaaaaggttctttgtgtatagccaaatgactgaaagcactgatatatttaaaaacaaaaggcaatttattaaggaaatttgtaccatttcagtaaacctgtctgaatgtacctgtatacgtttcaaaaacaccccccccccactgaatccctgtaacctatttattatataaagagtttgccttataaatttacataaaaatgtccgtttgtgtcttttgttgtaaaaatcaagtgattttttcataaggttcttttactattggaaaagatgggcagcacgcagttttattttatttttgtaagttttttaatacatgtgaaagcaaagaatactcagcatgcctttctaagtgacgcgtttgcaccttttgttgggaagtactgtatcctgtgctgttagcattctcgataaatctctctgtgaaagtga

SEQ ID NO: 1064 - DNA, 10455 bp, Homo sapiens
  source 1..10455: mol_type = genomic DNA
gcgcgcgctccctcctctcggagagagggctgtggtaaaagccgtccggaaaatggccgccgccgccgccgccgcgccgagcggaggaggaggaggaggcgaggaggagagactcactgagctagcctctccttgctagaagcttacggtcgaaggtctccagccatcagaagaagcacgtggagcgctgcgtccgtgttgtggttattcatccagcatgtgttgaggaagaaaagtcagaagaccaggacctccagggcctcaaggacaaacccctcaagtttaaaaaggtgaagaaagataagaaagaagagaaagagggcaagcatgagcccgtgcagccatcagcccaccactctgctgagcccgcagaggcaggcaaagcagagacatcagaagggtcaggctccgccccggctgtgccggaagcttctgcctcccccaaacagcggcgctccatcatccgtgaccggggacccatgtatgatgaccccaccctgcctgaaggctggacacggaagcttaagcaaaggaaatctggccgctctgctgggaagtatgatgtgtatttgatcaatccccagggaaaagcctttcgctctaaagtggagttgattgcgtacttcgaaaaggtaggcgacacatccctggaccctaatgattttgacttcacggtaactgggagagggagcccctcccggcgagagcagaaaccacctaagaagcccaaatctcccaaagctccaggaactggcagaggccggggacgccccaaagggagcggcaccacgagacccaaggcggccacgtcagagggtgtgcaggtgaaaagggtcctggagaaaagtcctgggaagctccttgtcaagatgccttttcaaacttcgccagggggcaaggctgaggggggtggggccaccacatccacccaggtcatggtgatcaaacgccccggcaggaagcgaaaagctgaggccgaccctcaggccattcccaagaaacggggccgaaagccggggagtgtggtggcagccgctgccgccgaggccaaaaagaaagccgtgaaggagtcttctatccgatctgtgcaggagaccgtactccccatcaagaagcgcaagacccgggagacggtcagcatcgaggtcaaggaagtggtgaagcccctgctggtgtccaccctcggtgagaagagcgggaaaggactgaagacctgtaagagccctgggcggaaaagcaaggagagcagccccaaggggcgcagcagcagcgcctcctcaccccccaagaaggagcaccaccaccatcaccaccactcagagtccccaaaggcccccgtgccactgctcccacccctgcccccacctccacctgagcccgagagctccgaggaccccaccagcccccctgagccccaggacttgagcagcagcgtctgcaaagaggagaagatgcccagaggaggctcactggagagcgacggctgccccaaggagccagctaagactcagcccgcggttgccaccgccgccacggccgcagaaaagtacaaacaccgaggggagggagagcgcaaagacattgtttcatcctccatgccaaggccaaacagagaggagcctgtggacagccggacgcccgtgaccgagagagttagctgactttacacggagcggattgcaaagcaaaccaacaagaataaaggcagctgttgtctcttctccttatgggtagggctctgacaaagcttcccgattaactgaaataaaaaatatttttttttctttcagtaaacttagagtttcgtggcttcagggtgggagtagttggagcattggggatgtttttcttaccgacaagcacagtcaggttgaagacctaaccagggccagaagtagctttgcacttttctaaactaggctccttcaacaaggcttgctgcagatactactgaccagacaagctgttgaccaggcacctcccctcccgcccaaacctttcccccatgtggtcgttagagacagagcgacagagcagttgagaggacactcccgttttcggtgccatcagtgccccgtctacagctcccccagctccccccacctcccccactcccaaccacgttgggacagggaggtgtgaggcaggagagacagttggattctttagagaagatggatatgaccagtggctatggcctgtgcgatcccacccgtggtggctcaagtctggccccacaccagccccaatccaaaactggcaaggacgcttcacaggacaggaaagtggcacctgtctgctccagctctggcatggctaggaggggggagtcccttgaactactgggtgtagactggcctgaaccacaggagaggatggcccagggtgaggtggcatggtccattctcaagggacgtcctccaacgggtggcgctagaggccatggaggcagtaggacaaggtgcaggcaggctggcctggggtcaggccgggcagagcacagcggggtgagagggattcctaatcactcagagcagtctgtgacttagtggacaggggagggggcaaagggggaggagaagaaaatgttcttccagttactttccaattctcctttagggacagcttagaattatttgcactattgagtcttcatgttcccacttcaaaacaaacagatgctctgagagcaaactggcttgaattggtgacatttagtccctcaagccaccagatgtgacagtgttgagaactacctggatttgtatatatacctgcgcttgttttaaagtgggctcagcacatagggttcccacgaagctccgaaactctaagtgtttgctgcaattttataaggacttcctgattggtttctcttctccccttccatttctgccttttgttcatttcatcctttcacttctttcccttcctccatcctcctccttcctagttcatcccttctcttccaggcagccgcggtgcccaaccacacttgtcggctccagtccccagaactctgcctgccctttgtcctcctgctgccagtaccagccccaccctgttttgagccctgaggaggccttgggctctgctgagtccgacctggcctgtctgtgaagagcaagagagcagcaaggtcttgctctcctaggtagccccctcttccctggtaagaaaaagcaaaaggcatttcccaccctgaacaacgagccttttcacccttctactctagagaagtggactggaggagctgggcccgatttggtagttgaggaaagcacagaggcctcctgtggcctgccagtcatcgagtggcccaacaggggctccatgccagccgaccttgacctcactcagaagtccagagtctagcgtagtgcagcagggcagtagcggtaccaatgcagaactcccaagacccgagctgggaccagtacctgggtccccagcccttcctctgctcccccttttccctcggagttcttcttgaatggcaatgttttgcttttgctcgatgcagacagggggccagaacaccacacatttcactgtctgtctggtccatagctgtggtgtaggggcttagaggcatgggcttgctgtgggtttttaattgatcagttttcatgtgggatcccatctttttaacctctgttcaggaagtccttatctagctgcatatcttcatcatattggtatatccttttctgtgtttacagagatgtctcttatatctaaatctgtccaactgagaagtaccttatcaaagtagcaaatgagacagcagtcttatgcttccagaaacacccacaggcatgtcccatgtgagctgctgccatgaactgtcaagtgtgtgttgtcttgtgtatttcagttattgtccctggcttccttactatggtgtaatcatgaaggagtgaaacatcatagaaactgtctagcacttccttgccagtctttagtgatcaggaaccatagttgacagttccaatcagtagcttaagaaaaaaccgtgtttgtctcttctggaatggttagaagtgagggagtttgccccgttctgtttgtagagtctcatagttggactttctagcatatatgtgtccatttccttatgctgtaaaagcaagtcctgcaaccaaactcccatcagcccaatccctgatccctgatcccttccacctgctctgctgatgacccccccagcttcacttctgactcttccccaggaagggaaggggggtcagaagagagggtgagtcctccagaactcttcctccaaggacagaaggctcctgcccccatagtggcctcgaactcctggcactaccaaaggacacttatccacgagagcgcagcatccgaccaggttgtcactgagaagatgtttattttggtcagttgggtttttatgtattatacttagtcaaatgtaatgtggcttctggaatcattgtccagagctgcttccccgtcacctgggcgtcatctggtcctggtaagaggagtgcgtggcccaccaggcccccctgtcacccatgacagttcattcagggccgatggggcagtcgtggttgggaacacagcatttcaagcgtcactttatttcattcgggccccacctgcagctccctcaaagaggcagttgcccagcctctttcccttccagtttattccagagctgccagtggggcctgaggctccttagggttttctctctatttccccctttcttcctcattccctcgtctttcccaaaggcatcacgagtcagtcgcctttcagcaggcagccttggcggtttatcgccctggcaggcaggggccctgcagctctcatgctgcccctgccttggggtcaggttgacaggaggttggagggaaagccttaagctgcaggattctcaccagctgtgtccggcccagttttggggtgtgacctcaatttcaattttgtctgtacttgaacattatgaagatgggggcctctttcagtgaatttgtgaacagcagaattgaccgacagctttccagtacccatggggctaggtcattaaggccacatccacagtctcccccacccttgttccagttgttagttactacctcctctcctgacaatactgtatgtcgtcgagctccccccaggtctacccctcccggccctgcctgctggtgggcttgtcatagccagtgggattgccggtcttgacagctcagtgagctggagatacttggtcacagccaggcgctagcacagctcccttctgttgatgctgtattcccatatcaaaagacacaggggacacccagaaacgccacatcccccaatccatcagtgccaaactagccaacggccccagcttctcagctcgctggatggcggaagctgctactcgtgagcgccagtgcgggtgcagacaatcttctgttgggtggcatcattccaggcccgaagcatgaacagtgcacctgggacagggagcagccccaaattgtcacctgcttctctgcccagcttttcattgctgtgacagtgatggcgaaagagggtaataaccagacacaaactgccaagttgggtggagaaaggagtttctttagctgacagaatctctgaattttaaatcacttagtaagcggctcaagcccaggagggagcagagggatacgagcggagtcccctgcgcgggaccatctggaattggtttagcccaagtggagcctgacagccagaactctgtgtcccccgtctaaccacagctccttttccagagcattccagtcaggctctctgggctgactgggccaggggaggttacaggtaccagttctttaagaagatctttgggcatatacatttttagcctgtgtcattgccccaaatggattcctgtttcaagttcacacctgcagattctaggacctgtgtcctagacttcagggagtcagctgtttctagagttcctaccatggagtgggtctggaggacctgcccggtgggggggcagagccctgctccctccgggtcttcctactcttctctctgctctgacgggatttgttgattctctccattttggtgtctttctcttttagatattgtatcaatctttagaaaaggcatagtctacttgttataaatcgttaggatactgcctcccccagggtctaaaattacatattagaggggaaaagctgaacactgaagtcagttctcaacaatttagaaggaaaacctagaaaacatttggcagaaaattacatttcgatgtttttgaatgaatacgagcaagcttttacaacagtgctgatctaaaaatacttagcacttggcctgagatgcctggtgagcattacaggcaaggggaatctggaggtagccgacctgaggacatggcttctgaacctgtcttttgggagtggtatggaaggtggagcgttcaccagtgacctggaaggcccagcaccaccctccttcccactcttctcatcttgacagagcctgccccagcgctgacgtgtcaggaaaacacccagggaactaggaaggcacttctgcctgaggggcagcctgccttgcccactcctgctctgctcgcctcggatcagctgagccttctgagctggcctctcactgcctccccaaggccccctgcctgccctgtcaggaggcagaaggaagcaggtgtgagggcagtgcaaggagggagcacaacccccagctcccgctccgggctccgacttgtgcacaggcagagcccagaccctggaggaaatcctacctttgaattcaagaacatttggggaatttggaaatctctttgcccccaaacccccattctgtcctacctttaatcaggtcctgctcagcagtgagagcagatgaggtgaaaaggccaagaggtttggctcctgcccactgatagcccctctccccgcagtgtttgtgtgtcaagtggcaaagctgttcttcctggtgaccctgattatatccagtaacacatagactgtgcgcataggcctgctttgtctcctctatcctgggcttttgttttgctttttagttttgcttttagtttttctgtcccttttatttaacgcaccgactagacacacaaagcagttgaatttttatatatatatctgtatattgcacaattataaactcattttgcttgtggctccacacacacaaaaaaagacctgttaaaattatacctgttgcttaattacaatatttctgataaccatagcataggacaagggaaaataaaaaaagaaaaaaaagaaaaaaaaacgacaaatctgtctgctggtcacttcttctgtccaagcagattcgtggtcttttcctcgcttctttcaagggctttcctgtgccaggtgaaggaggctccaggcagcacccaggttttgcactcttgtttctcccgtgcttgtgaaagaggtcccaaggttctgggtgcaggagcgctcccttgacctgctgaagtccggaacgtagtcggcacagcctggtcgccttccacctctgggagctggagtccactggggtggcctgactcccccagtccccttcccgtgacctggtcagggtgagcccatgtggagtcagcctcgcaggcctccctgccagtagggtccgagtgtgtttcatccttcccactctgtcgagcctgggggctggagcggagacgggaggcctggcctgtctcggaacctgtgagctgcaccaggtagaacgccagggaccccagaatcatgtgcgtcagtccaaggggtcccctccaggagtagtgaagactccagaaatgtccctttcttctcccccatcctacgagtaattgcatttgcttttgtaattcttaatgagcaatatctgctagagagtttagctgtaacagttctttttgatcatctttttttaataattagaaacaccaaaaaaatccagaaacttgttcttccaaagcagagagcattataatcaccagggccaaaagcttccctccctgctgtcattgcttcttctgaggcctgaatccaaaagaaaaacagccataggccctttcagtggccgggctacccgtgagcccttcggaggaccagggctggggcagcctctgggcccacatccggggccagctccggcgtgtgttcagtgttagcagtgggtcatgatgctctttcccacccagcctgggataggggcagaggaggcgaggaggccgttgccgctgatgtttggccgtgaacaggtgggtgtctgcgtgcgtccacgtgcgtgttttctgactgacatgaaatcgacgcccgagttagcctcacccggtgacctctagccctgcccggatggagcggggcccacccggttcagtgtttctggggagctggacagtggagtgcaaaaggcttgcagaacttgaagcctgctccttcccttgctaccacggcctcctttccgtttgatttgtcactgcttcaatcaataacagccgctccagagtcagtagtcaatgaatatatgaccaaatatcaccaggactgttactcaatgtgtgccgagcccttgcccatgctgggctcccgtgtatctggacactgtaacgtgtgctgtgtttgctccccttccccttccttctttgccctttacttgtctttctggggtttttctgtttgggtttggtttggtttttatttctccttttgtgttccaaacatgaggttctctctactggtcctcttaactgtggtgttgaggcttatatttgtgtaatttttggtgggtgaaaggaattttgctaagtaaatctcttctgtgtttgaactgaagtctgtattgtaactatgtttaaagtaattgttccagagacaaatatttctagacactttttctttacaaacaaaagcattcggagggagggggatggtgactgagatgagaggggagagctgaacagatgacccctgcccagatcagccagaagccacccaaagcagtggagcccaggagtcccactccaagccagcaagccgaatagctgatgtgttgccactttccaagtcactgcaaaaccaggttttgttccgcccagtggattcttgttttgcttcccctccccccgagattattaccaccatcccgtgcttttaaggaaaggcaagattgatgtttccttgaggggagccaggaggggatgtgtgtgtgcagagctgaagagctggggagaatggggctgggcccacccaagcaggaggctgggacgctctgctgtgggcacaggtcaggctaatgttggcagatgcagctcttcctggacaggccaggtggtgggcattctctctccaaggtgtgccccgtgggcattactgtttaagacacttccgtcacatcccaccccatcctccagggctcaacactgtgacatctctattccccaccctccccttcccagggcaataaaatgaccatggagggggcttgcactctcttggctgtcacccgatcgccagcaaaacttagatgtgagaaaaccccttcccattccatggcgaaaacatctccttagaaaagccattaccctcattaggcatggttttgggctcccaaaacacctgacagcccctccctcctctgagaggcggagagtgctgactgtagtgaccattgcatgccgggtgcagcatctggaagagctaggcagggtgtctgccccctcctgagttgaagtcatgctcccctgtgccagcccagaggccgagagctatggacagcattgccagtaacacaggccaccctgtgcagaagggagctggctccagcctggaaacctgtctgaggttgggagaggtgcacttggggcacagggagaggccgggacacacttagctggagatgtctctaaaagccctgtatcgtattcaccttcagtttttgtgttttgggacaattactttagaaaataagtaggtcgttttaaaaacaaaaattattgattgcttttttgtagtgttcagaaaaaaggttctttgtgtatagccaaatgactgaaagcactgatatatttaaaaacaaaaggcaatttattaaggaaatttgtaccatttcagtaaacctgtctgaatgtacctgtatacgtttcaaaaacaccccccccccactgaatccctgtaacctatttattatataaagagtttgccttataaatttacataaaaatgtccgtttgtgtcttttgttgtaaaaatcaagtgattttttcataaggttcttttactattggaaaagatgggcagcacgcagttttattttatttttgtaagttttttaatacatgtgaaagcaaagaatactcagcatgcctttctaagtgacgcgtttgcaccttttgttgggaagtactgtatcctgtgctgttagcattctcgataaatctctctgtgaaagtga

SEQ ID NO: 1065 - DNA, 10386 bp, Homo sapiens
  source 1..10386: mol_type = genomic DNA
agtaggtggggattattatccacaaaagggactagacattgtgttctgggtcccacaactcatcataaagaggtggttatagttcccatcaggagccgtgggtaggggactgtgcgtccagcagcacccgaggctcttcggcgccagaggctctaagggaagaaaagtcagaagaccaggacctccagggcctcaaggacaaacccctcaagtttaaaaaggtgaagaaagataagaaagaagagaaagagggcaagcatgagcccgtgcagccatcagcccaccactctgctgagcccgcagaggcaggcaaagcagagacatcagaagggtcaggctccgccccggctgtgccggaagcttctgcctcccccaaacagcggcgctccatcatccgtgaccggggacccatgtatgatgaccccaccctgcctgaaggctggacacggaagcttaagcaaaggaaatctggccgctctgctgggaagtatgatgtgtatttgatcaatccccagggaaaagcctttcgctctaaagtggagttgattgcgtacttcgaaaaggtaggcgacacatccctggaccctaatgattttgacttcacggtaactgggagagggagcccctcccggcgagagcagaaaccacctaagaagcccaaatctcccaaagctccaggaactggcagaggccggggacgccccaaagggagcggcaccacgagacccaaggcggccacgtcagagggtgtgcaggtgaaaagggtcctggagaaaagtcctgggaagctccttgtcaagatgccttttcaaacttcgccagggggcaaggctgaggggggtggggccaccacatccacccaggtcatggtgatcaaacgccccggcaggaagcgaaaagctgaggccgaccctcaggccattcccaagaaacggggccgaaagccggggagtgtggtggcagccgctgccgccgaggccaaaaagaaagccgtgaaggagtcttctatccgatctgtgcaggagaccgtactccccatcaagaagcgcaagacccgggagacggtcagcatcgaggtcaaggaagtggtgaagcccctgctggtgtccaccctcggtgagaagagcgggaaaggactgaagacctgtaagagccctgggcggaaaagcaaggagagcagccccaaggggcgcagcagcagcgcctcctcaccccccaagaaggagcaccaccaccatcaccaccactcagagtccccaaaggcccccgtgccactgctcccacccctgcccccacctccacctgagcccgagagctccgaggaccccaccagcccccctgagccccaggacttgagcagcagcgtctgcaaagaggagaagatgcccagaggaggctcactggagagcgacggctgccccaaggagccagctaagactcagcccgcggttgccaccgccgccacggccgcagaaaagtacaaacaccgaggggagggagagcgcaaagacattgtttcatcctccatgccaaggccaaacagagaggagcctgtggacagccggacgcccgtgaccgagagagttagctgactttacacggagcggattgcaaagcaaaccaacaagaataaaggcagctgttgtctcttctccttatgggtagggctctgacaaagcttcccgattaactgaaataaaaaatatttttttttctttcagtaaacttagagtttcgtggcttcagggtgggagtagttggagcattggggatgtttttcttaccgacaagcacagtcaggttgaagacctaaccagggccagaagtagctttgcacttttctaaactaggctccttcaacaaggcttgctgcagatactactgaccagacaagctgttgaccaggcacctcccctcccgcccaaacctttcccccatgtggtcgttagagacagagcgacagagcagttgagaggacactcccgttttcggtgccatcagtgccccgtctacagctcccccagctccccccacctcccccactcccaaccacgttgggacagggaggtgtgaggcaggagagacagttggattctttagagaagatggatatgaccagtggctatggcctgtgcgatcccacccgtggtggctcaagtctggccccacaccagccccaatccaaaactggcaaggacgcttcacaggacaggaaagtggcacctgtctgctccagctctggcatggctaggaggggggagtcccttgaactactgggtgtagactggcctgaaccacaggagaggatggcccagggtgaggtggcatggtccattctcaagggacgtcctccaacgggtggcgctagaggccatggaggcagtaggacaaggtgcaggcaggctggcctggggtcaggccgggcagagcacagcggggtgagagggattcctaatcactcagagcagtctgtgacttagtggacaggggagggggcaaagggggaggagaagaaaatgttcttccagttactttccaattctcctttagggacagcttagaattatttgcactattgagtcttcatgttcccacttcaaaacaaacagatgctctgagagcaaactggcttgaattggtgacatttagtccctcaagccaccagatgtgacagtgttgagaactacctggatttgtatatatacctgcgcttgttttaaagtgggctcagcacatagggttcccacgaagctccgaaactctaagtgtttgctgcaattttataaggacttcctgattggtttctcttctccccttccatttctgccttttgttcatttcatcctttcacttctttcccttcctccatcctcctccttcctagttcatcccttctcttccaggcagccgcggtgcccaaccacacttgtcggctccagtccccagaactctgcctgccctttgtcctcctgctgccagtaccagccccaccctgttttgagccctgaggaggccttgggctctgctgagtccgacctggcctgtctgtgaagagcaagagagcagcaaggtcttgctctcctaggtagccccctcttccctggtaagaaaaagcaaaaggcatttcccaccctgaacaacgagccttttcacccttctactctagagaagtggactggaggagctgggcccgatttggtagttgaggaaagcacagaggcctcctgtggcctgccagtcatcgagtggcccaacaggggctccatgccagccgaccttgacctcactcagaagtccagagtctagcgtagtgcagcagggcagtagcggtaccaatgcagaactcccaagacccgagctgggaccagtacctgggtccccagcccttcctctgctcccccttttccctcggagttcttcttgaatggcaatgttttgcttttgctcgatgcagacagggggccagaacaccacacatttcactgtctgtctggtccatagctgtggtgtaggggcttagaggcatgggcttgctgtgggtttttaattgatcagttttcatgtgggatcccatctttttaacctctgttcaggaagtccttatctagctgcatatcttcatcatattggtatatccttttctgtgtttacagagatgtctcttatatctaaatctgtccaactgagaagtaccttatcaaagtagcaaatgagacagcagtcttatgcttccagaaacacccacaggcatgtcccatgtgagctgctgccatgaactgtcaagtgtgtgttgtcttgtgtatttcagttattgtccctggcttccttactatggtgtaatcatgaaggagtgaaacatcatagaaactgtctagcacttccttgccagtctttagtgatcaggaaccatagttgacagttccaatcagtagcttaagaaaaaaccgtgtttgtctcttctggaatggttagaagtgagggagtttgccccgttctgtttgtagagtctcatagttggactttctagcatatatgtgtccatttccttatgctgtaaaagcaagtcctgcaaccaaactcccatcagcccaatccctgatccctgatcccttccacctgctctgctgatgacccccccagcttcacttctgactcttccccaggaagggaaggggggtcagaagagagggtgagtcctccagaactcttcctccaaggacagaaggctcctgcccccatagtggcctcgaactcctggcactaccaaaggacacttatccacgagagcgcagcatccgaccaggttgtcactgagaagatgtttattttggtcagttgggtttttatgtattatacttagtcaaatgtaatgtggcttctggaatcattgtccagagctgcttccccgtcacctgggcgtcatctggtcctggtaagaggagtgcgtggcccaccaggcccccctgtcacccatgacagttcattcagggccgatggggcagtcgtggttgggaacacagcatttcaagcgtcactttatttcattcgggccccacctgcagctccctcaaagaggcagttgcccagcctctttcccttccagtttattccagagctgccagtggggcctgaggctccttagggttttctctctatttccccctttcttcctcattccctcgtctttcccaaaggcatcacgagtcagtcgcctttcagcaggcagccttggcggtttatcgccctggcaggcaggggccctgcagctctcatgctgcccctgccttggggtcaggttgacaggaggttggagggaaagccttaagctgcaggattctcaccagctgtgtccggcccagttttggggtgtgacctcaatttcaattttgtctgtacttgaacattatgaagatgggggcctctttcagtgaatttgtgaacagcagaattgaccgacagctttccagtacccatggggctaggtcattaaggccacatccacagtctcccccacccttgttccagttgttagttactacctcctctcctgacaatactgtatgtcgtcgagctccccccaggtctacccctcccggccctgcctgctggtgggcttgtcatagccagtgggattgccggtcttgacagctcagtgagctggagatacttggtcacagccaggcgctagcacagctcccttctgttgatgctgtattcccatatcaaaagacacaggggacacccagaaacgccacatcccccaatccatcagtgccaaactagccaacggccccagcttctcagctcgctggatggcggaagctgctactcgtgagcgccagtgcgggtgcagacaatcttctgttgggtggcatcattccaggcccgaagcatgaacagtgcacctgggacagggagcagccccaaattgtcacctgcttctctgcccagcttttcattgctgtgacagtgatggcgaaagagggtaataaccagacacaaactgccaagttgggtggagaaaggagtttctttagctgacagaatctctgaattttaaatcacttagtaagcggctcaagcccaggagggagcagagggatacgagcggagtcccctgcgcgggaccatctggaattggtttagcccaagtggagcctgacagccagaactctgtgtcccccgtctaaccacagctccttttccagagcattccagtcaggctctctgggctgactgggccaggggaggttacaggtaccagttctttaagaagatctttgggcatatacatttttagcctgtgtcattgccccaaatggattcctgtttcaagttcacacctgcagattctaggacctgtgtcctagacttcagggagtcagctgtttctagagttcctaccatggagtgggtctggaggacctgcccggtgggggggcagagccctgctccctccgggtcttcctactcttctctctgctctgacgggatttgttgattctctccattttggtgtctttctcttttagatattgtatcaatctttagaaaaggcatagtctacttgttataaatcgttaggatactgcctcccccagggtctaaaattacatattagaggggaaaagctgaacactgaagtcagttctcaacaatttagaaggaaaacctagaaaacatttggcagaaaattacatttcgatgtttttgaatgaatacgagcaagcttttacaacagtgctgatctaaaaatacttagcacttggcctgagatgcctggtgagcattacaggcaaggggaatctggaggtagccgacctgaggacatggcttctgaacctgtcttttgggagtggtatggaaggtggagcgttcaccagtgacctggaaggcccagcaccaccctccttcccactcttctcatcttgacagagcctgccccagcgctgacgtgtcaggaaaacacccagggaactaggaaggcacttctgcctgaggggcagcctgccttgcccactcctgctctgctcgcctcggatcagctgagccttctgagctggcctctcactgcctccccaaggccccctgcctgccctgtcaggaggcagaaggaagcaggtgtgagggcagtgcaaggagggagcacaacccccagctcccgctccgggctccgacttgtgcacaggcagagcccagaccctggaggaaatcctacctttgaattcaagaacatttggggaatttggaaatctctttgcccccaaacccccattctgtcctacctttaatcaggtcctgctcagcagtgagagcagatgaggtgaaaaggccaagaggtttggctcctgcccactgatagcccctctccccgcagtgtttgtgtgtcaagtggcaaagctgttcttcctggtgaccctgattatatccagtaacacatagactgtgcgcataggcctgctttgtctcctctatcctgggcttttgttttgctttttagttttgcttttagtttttctgtcccttttatttaacgcaccgactagacacacaaagcagttgaatttttatatatatatctgtatattgcacaattataaactcattttgcttgtggctccacacacacaaaaaaagacctgttaaaattatacctgttgcttaattacaatatttctgataaccatagcataggacaagggaaaataaaaaaagaaaaaaaagaaaaaaaaacgacaaatctgtctgctggtcacttcttctgtccaagcagattcgtggtcttttcctcgcttctttcaagggctttcctgtgccaggtgaaggaggctccaggcagcacccaggttttgcactcttgtttctcccgtgcttgtgaaagaggtcccaaggttctgggtgcaggagcgctcccttgacctgctgaagtccggaacgtagtcggcacagcctggtcgccttccacctctgggagctggagtccactggggtggcctgactcccccagtccccttcccgtgacctggtcagggtgagcccatgtggagtcagcctcgcaggcctccctgccagtagggtccgagtgtgtttcatccttcccactctgtcgagcctgggggctggagcggagacgggaggcctggcctgtctcggaacctgtgagctgcaccaggtagaacgccagggaccccagaatcatgtgcgtcagtccaaggggtcccctccaggagtagtgaagactccagaaatgtccctttcttctcccccatcctacgagtaattgcatttgcttttgtaattcttaatgagcaatatctgctagagagtttagctgtaacagttctttttgatcatctttttttaataattagaaacaccaaaaaaatccagaaacttgttcttccaaagcagagagcattataatcaccagggccaaaagcttccctccctgctgtcattgcttcttctgaggcctgaatccaaaagaaaaacagccataggccctttcagtggccgggctacccgtgagcccttcggaggaccagggctggggcagcctctgggcccacatccggggccagctccggcgtgtgttcagtgttagcagtgggtcatgatgctctttcccacccagcctgggataggggcagaggaggcgaggaggccgttgccgctgatgtttggccgtgaacaggtgggtgtctgcgtgcgtccacgtgcgtgttttctgactgacatgaaatcgacgcccgagttagcctcacccggtgacctctagccctgcccggatggagcggggcccacccggttcagtgtttctggggagctggacagtggagtgcaaaaggcttgcagaacttgaagcctgctccttcccttgctaccacggcctcctttccgtttgatttgtcactgcttcaatcaataacagccgctccagagtcagtagtcaatgaatatatgaccaaatatcaccaggactgttactcaatgtgtgccgagcccttgcccatgctgggctcccgtgtatctggacactgtaacgtgtgctgtgtttgctccccttccccttccttctttgccctttacttgtctttctggggtttttctgtttgggtttggtttggtttttatttctccttttgtgttccaaacatgaggttctctctactggtcctcttaactgtggtgttgaggcttatatttgtgtaatttttggtgggtgaaaggaattttgctaagtaaatctcttctgtgtttgaactgaagtctgtattgtaactatgtttaaagtaattgttccagagacaaatatttctagacactttttctttacaaacaaaagcattcggagggagggggatggtgactgagatgagaggggagagctgaacagatgacccctgcccagatcagccagaagccacccaaagcagtggagcccaggagtcccactccaagccagcaagccgaatagctgatgtgttgccactttccaagtcactgcaaaaccaggttttgttccgcccagtggattcttgttttgcttcccctccccccgagattattaccaccatcccgtgcttttaaggaaaggcaagattgatgtttccttgaggggagccaggaggggatgtgtgtgtgcagagctgaagagctggggagaatggggctgggcccacccaagcaggaggctgggacgctctgctgtgggcacaggtcaggctaatgttggcagatgcagctcttcctggacaggccaggtggtgggcattctctctccaaggtgtgccccgtgggcattactgtttaagacacttccgtcacatcccaccccatcctccagggctcaacactgtgacatctctattccccaccctccccttcccagggcaataaaatgaccatggagggggcttgcactctcttggctgtcacccgatcgccagcaaaacttagatgtgagaaaaccccttcccattccatggcgaaaacatctccttagaaaagccattaccctcattaggcatggttttgggctcccaaaacacctgacagcccctccctcctctgagaggcggagagtgctgactgtagtgaccattgcatgccgggtgcagcatctggaagagctaggcagggtgtctgccccctcctgagttgaagtcatgctcccctgtgccagcccagaggccgagagctatggacagcattgccagtaacacaggccaccctgtgcagaagggagctggctccagcctggaaacctgtctgaggttgggagaggtgcacttggggcacagggagaggccgggacacacttagctggagatgtctctaaaagccctgtatcgtattcaccttcagtttttgtgttttgggacaattactttagaaaataagtaggtcgttttaaaaacaaaaattattgattgcttttttgtagtgttcagaaaaaaggttctttgtgtatagccaaatgactgaaagcactgatatatttaaaaacaaaaggcaatttattaaggaaatttgtaccatttcagtaaacctgtctgaatgtacctgtatacgtttcaaaaacaccccccccccactgaatccctgtaacctatttattatataaagagtttgccttataaatttacataaaaatgtccgtttgtgtcttttgttgtaaaaatcaagtgattttttcataaggttcttttactattggaaaagatgggcagcacgcagttttattttatttttgtaagttttttaatacatgtgaaagcaaagaatactcagcatgcctttctaagtgacgcgtttgcaccttttgttgggaagtactgtatcctgtgctgttagcattctcgataaatctctctgtgaaagtga

SEQ ID NO: 1066 - DNA, 10470 bp, Homo sapiens
  source 1..10470: mol_type = genomic DNA
gcgcgcgctccctcctctcggagagagggctgtggtaaaagccgtccggaaaatggccgccgccgccgccgccgcgccgagcggaggaggaggaggaggcgaggaggagagactgctccataaaaatacagactcaccagttcctgctttgatgtgacatgtgactccccagaatacaccttgcttctgtagaccagctccaacaggattccatggtagctgggatgttagggctcagcactgagctagcctctccttgctagaagcttacggtcgaaggtctccagccatcagaagaagcacgtggagcgctgcgtccgtgttgtggttattcatccagcatgtgttgaggaagaaaagtcagaagaccaggacctccagggcctcaaggacaaacccctcaagtttaaaaaggtgaagaaagataagaaagaagagaaagagggcaagcatgagcccgtgcagccatcagcccaccactctgctgagcccgcagaggcaggcaaagcagagacatcagaagggtcaggctccgccccggctgtgccggaagcttctgcctcccccaaacagcggcgctccatcatccgtgaccggggacccatgtatgatgaccccaccctgcctgaaggctggacacggaagcttaagcaaaggaaatctggccgctctgctgggaagtatgatgtgtatttgatcaatccccagggaaaagcctttcgctctaaagtggagttgattgcgtacttcgaaaagctccaggaactggcagaggccggggacgccccaaagggagcggcaccacgagacccaaggcggccacgtcagagggtgtgcaggtgaaaagggtcctggagaaaagtcctgggaagctccttgtcaagatgccttttcaaacttcgccagggggcaaggctgaggggggtggggccaccacatccacccaggtcatggtgatcaaacgccccggcaggaagcgaaaagctgaggccgaccctcaggccattcccaagaaacggggccgaaagccggggagtgtggtggcagccgctgccgccgaggccaaaaagaaagccgtgaaggagtcttctatccgatctgtgcaggagaccgtactccccatcaagaagcgcaagacccgggagacggtcagcatcgaggtcaaggaagtggtgaagcccctgctggtgtccaccctcggtgagaagagcgggaaaggactgaagacctgtaagagccctgggcggaaaagcaaggagagcagccccaaggggcgcagcagcagcgcctcctcaccccccaagaaggagcaccaccaccatcaccaccactcagagtccccaaaggcccccgtgccactgctcccacccctgcccccacctccacctgagcccgagagctccgaggaccccaccagcccccctgagccccaggacttgagcagcagcgtctgcaaagaggagaagatgcccagaggaggctcactggagagcgacggctgccccaaggagccagctaagactcagcccgcggttgccaccgccgccacggccgcagaaaagtacaaacaccgaggggagggagagcgcaaagacattgtttcatcctccatgccaaggccaaacagagaggagcctgtggacagccggacgcccgtgaccgagagagttagctgactttacacggagcggattgcaaagcaaaccaacaagaataaaggcagctgttgtctcttctccttatgggtagggctctgacaaagcttcccgattaactgaaataaaaaatatttttttttctttcagtaaacttagagtttcgtggcttcagggtgggagtagttggagcattggggatgtttttcttaccgacaagcacagtcaggttgaagacctaaccagggccagaagtagctttgcacttttctaaactaggctccttcaacaaggcttgctgcagatactactgaccagacaagctgttgaccaggcacctcccctcccgcccaaacctttcccccatgtggtcgttagagacagagcgacagagcagttgagaggacactcccgttttcggtgccatcagtgccccgtctacagctcccccagctccccccacctcccccactcccaaccacgttgggacagggaggtgtgaggcaggagagacagttggattctttagagaagatggatatgaccagtggctatggcctgtgcgatcccacccgtggtggctcaagtctggccccacaccagccccaatccaaaactggcaaggacgcttcacaggacaggaaagtggcacctgtctgctccagctctggcatggctaggaggggggagtcccttgaactactgggtgtagactggcctgaaccacaggagaggatggcccagggtgaggtggcatggtccattctcaagggacgtcctccaacgggtggcgctagaggccatggaggcagtaggacaaggtgcaggcaggctggcctggggtcaggccgggcagagcacagcggggtgagagggattcctaatcactcagagcagtctgtgacttagtggacaggggagggggcaaagggggaggagaagaaaatgttcttccagttactttccaattctcctttagggacagcttagaattatttgcactattgagtcttcatgttcccacttcaaaacaaacagatgctctgagagcaaactggcttgaattggtgacatttagtccctcaagccaccagatgtgacagtgttgagaactacctggatttgtatatatacctgcgcttgttttaaagtgggctcagcacatagggttcccacgaagctccgaaactctaagtgtttgctgcaattttataaggacttcctgattggtttctcttctccccttccatttctgccttttgttcatttcatcctttcacttctttcccttcctccatcctcctccttcctagttcatcccttctcttccaggcagccgcggtgcccaaccacacttgtcggctccagtccccagaactctgcctgccctttgtcctcctgctgccagtaccagccccaccctgttttgagccctgaggaggccttgggctctgctgagtccgacctggcctgtctgtgaagagcaagagagcagcaaggtcttgctctcctaggtagccccctcttccctggtaagaaaaagcaaaaggcatttcccaccctgaacaacgagccttttcacccttctactctagagaagtggactggaggagctgggcccgatttggtagttgaggaaagcacagaggcctcctgtggcctgccagtcatcgagtggcccaacaggggctccatgccagccgaccttgacctcactcagaagtccagagtctagcgtagtgcagcagggcagtagcggtaccaatgcagaactcccaagacccgagctgggaccagtacctgggtccccagcccttcctctgctcccccttttccctcggagttcttcttgaatggcaatgttttgcttttgctcgatgcagacagggggccagaacaccacacatttcactgtctgtctggtccatagctgtggtgtaggggcttagaggcatgggcttgctgtgggtttttaattgatcagttttcatgtgggatcccatctttttaacctctgttcaggaagtccttatctagctgcatatcttcatcatattggtatatccttttctgtgtttacagagatgtctcttatatctaaatctgtccaactgagaagtaccttatcaaagtagcaaatgagacagcagtcttatgcttccagaaacacccacaggcatgtcccatgtgagctgctgccatgaactgtcaagtgtgtgttgtcttgtgtatttcagttattgtccctggcttccttactatggtgtaatcatgaaggagtgaaacatcatagaaactgtctagcacttccttgccagtctttagtgatcaggaaccatagttgacagttccaatcagtagcttaagaaaaaaccgtgtttgtctcttctggaatggttagaagtgagggagtttgccccgttctgtttgtagagtctcatagttggactttctagcatatatgtgtccatttccttatgctgtaaaagcaagtcctgcaaccaaactcccatcagcccaatccctgatccctgatcccttccacctgctctgctgatgacccccccagcttcacttctgactcttccccaggaagggaaggggggtcagaagagagggtgagtcctccagaactcttcctccaaggacagaaggctcctgcccccatagtggcctcgaactcctggcactaccaaaggacacttatccacgagagcgcagcatccgaccaggttgtcactgagaagatgtttattttggtcagttgggtttttatgtattatacttagtcaaatgtaatgtggcttctggaatcattgtccagagctgcttccccgtcacctgggcgtcatctggtcctggtaagaggagtgcgtggcccaccaggcccccctgtcacccatgacagttcattcagggccgatggggcagtcgtggttgggaacacagcatttcaagcgtcactttatttcattcgggccccacctgcagctccctcaaagaggcagttgcccagcctctttcccttccagtttattccagagctgccagtggggcctgaggctccttagggttttctctctatttccccctttcttcctcattccctcgtctttcccaaaggcatcacgagtcagtcgcctttcagcaggcagccttggcggtttatcgccctggcaggcaggggccctgcagctctcatgctgcccctgccttggggtcaggttgacaggaggttggagggaaagccttaagctgcaggattctcaccagctgtgtccggcccagttttggggtgtgacctcaatttcaattttgtctgtacttgaacattatgaagatgggggcctctttcagtgaatttgtgaacagcagaattgaccgacagctttccagtacccatggggctaggtcattaaggccacatccacagtctcccccacccttgttccagttgttagttactacctcctctcctgacaatactgtatgtcgtcgagctccccccaggtctacccctcccggccctgcctgctggtgggcttgtcatagccagtgggattgccggtcttgacagctcagtgagctggagatacttggtcacagccaggcgctagcacagctcccttctgttgatgctgtattcccatatcaaaagacacaggggacacccagaaacgccacatcccccaatccatcagtgccaaactagccaacggccccagcttctcagctcgctggatggcggaagctgctactcgtgagcgccagtgcgggtgcagacaatcttctgttgggtggcatcattccaggcccgaagcatgaacagtgcacctgggacagggagcagccccaaattgtcacctgcttctctgcccagcttttcattgctgtgacagtgatggcgaaagagggtaataaccagacacaaactgccaagttgggtggagaaaggagtttctttagctgacagaatctctgaattttaaatcacttagtaagcggctcaagcccaggagggagcagagggatacgagcggagtcccctgcgcgggaccatctggaattggtttagcccaagtggagcctgacagccagaactctgtgtcccccgtctaaccacagctccttttccagagcattccagtcaggctctctgggctgactgggccaggggaggttacaggtaccagttctttaagaagatctttgggcatatacatttttagcctgtgtcattgccccaaatggattcctgtttcaagttcacacctgcagattctaggacctgtgtcctagacttcagggagtcagctgtttctagagttcctaccatggagtgggtctggaggacctgcccggtgggggggcagagccctgctccctccgggtcttcctactcttctctctgctctgacgggatttgttgattctctccattttggtgtctttctcttttagatattgtatcaatctttagaaaaggcatagtctacttgttataaatcgttaggatactgcctcccccagggtctaaaattacatattagaggggaaaagctgaacactgaagtcagttctcaacaatttagaaggaaaacctagaaaacatttggcagaaaattacatttcgatgtttttgaatgaatacgagcaagcttttacaacagtgctgatctaaaaatacttagcacttggcctgagatgcctggtgagcattacaggcaaggggaatctggaggtagccgacctgaggacatggcttctgaacctgtcttttgggagtggtatggaaggtggagcgttcaccagtgacctggaaggcccagcaccaccctccttcccactcttctcatcttgacagagcctgccccagcgctgacgtgtcaggaaaacacccagggaactaggaaggcacttctgcctgaggggcagcctgccttgcccactcctgctctgctcgcctcggatcagctgagccttctgagctggcctctcactgcctccccaaggccccctgcctgccctgtcaggaggcagaaggaagcaggtgtgagggcagtgcaaggagggagcacaacccccagctcccgctccgggctccgacttgtgcacaggcagagcccagaccctggaggaaatcctacctttgaattcaagaacatttggggaatttggaaatctctttgcccccaaacccccattctgtcctacctttaatcaggtcctgctcagcagtgagagcagatgaggtgaaaaggccaagaggtttggctcctgcccactgatagcccctctccccgcagtgtttgtgtgtcaagtggcaaagctgttcttcctggtgaccctgattatatccagtaacacatagactgtgcgcataggcctgctttgtctcctctatcctgggcttttgttttgctttttagttttgcttttagtttttctgtcccttttatttaacgcaccgactagacacacaaagcagttgaatttttatatatatatctgtatattgcacaattataaactcattttgcttgtggctccacacacacaaaaaaagacctgttaaaattatacctgttgcttaattacaatatttctgataaccatagcataggacaagggaaaataaaaaaagaaaaaaaagaaaaaaaaacgacaaatctgtctgctggtcacttcttctgtccaagcagattcgtggtcttttcctcgcttctttcaagggctttcctgtgccaggtgaaggaggctccaggcagcacccaggttttgcactcttgtttctcccgtgcttgtgaaagaggtcccaaggttctgggtgcaggagcgctcccttgacctgctgaagtccggaacgtagtcggcacagcctggtcgccttccacctctgggagctggagtccactggggtggcctgactcccccagtccccttcccgtgacctggtcagggtgagcccatgtggagtcagcctcgcaggcctccctgccagtagggtccgagtgtgtttcatccttcccactctgtcgagcctgggggctggagcggagacgggaggcctggcctgtctcggaacctgtgagctgcaccaggtagaacgccagggaccccagaatcatgtgcgtcagtccaaggggtcccctccaggagtagtgaagactccagaaatgtccctttcttctcccccatcctacgagtaattgcatttgcttttgtaattcttaatgagcaatatctgctagagagtttagctgtaacagttctttttgatcatctttttttaataattagaaacaccaaaaaaatccagaaacttgttcttccaaagcagagagcattataatcaccagggccaaaagcttccctccctgctgtcattgcttcttctgaggcctgaatccaaaagaaaaacagccataggccctttcagtggccgggctacccgtgagcccttcggaggaccagggctggggcagcctctgggcccacatccggggccagctccggcgtgtgttcagtgttagcagtgggtcatgatgctctttcccacccagcctgggataggggcagaggaggcgaggaggccgttgccgctgatgtttggccgtgaacaggtgggtgtctgcgtgcgtccacgtgcgtgttttctgactgacatgaaatcgacgcccgagttagcctcacccggtgacctctagccctgcccggatggagcggggcccacccggttcagtgtttctggggagctggacagtggagtgcaaaaggcttgcagaacttgaagcctgctccttcccttgctaccacggcctcctttccgtttgatttgtcactgcttcaatcaataacagccgctccagagtcagtagtcaatgaatatatgaccaaatatcaccaggactgttactcaatgtgtgccgagcccttgcccatgctgggctcccgtgtatctggacactgtaacgtgtgctgtgtttgctccccttccccttccttctttgccctttacttgtctttctggggtttttctgtttgggtttggtttggtttttatttctccttttgtgttccaaacatgaggttctctctactggtcctcttaactgtggtgttgaggcttatatttgtgtaatttttggtgggtgaaaggaattttgctaagtaaatctcttctgtgtttgaactgaagtctgtattgtaactatgtttaaagtaattgttccagagacaaatatttctagacactttttctttacaaacaaaagcattcggagggagggggatggtgactgagatgagaggggagagctgaacagatgacccctgcccagatcagccagaagccacccaaagcagtggagcccaggagtcccactccaagccagcaagccgaatagctgatgtgttgccactttccaagtcactgcaaaaccaggttttgttccgcccagtggattcttgttttgcttcccctccccccgagattattaccaccatcccgtgcttttaaggaaaggcaagattgatgtttccttgaggggagccaggaggggatgtgtgtgtgcagagctgaagagctggggagaatggggctgggcccacccaagcaggaggctgggacgctctgctgtgggcacaggtcaggctaatgttggcagatgcagctcttcctggacaggccaggtggtgggcattctctctccaaggtgtgccccgtgggcattactgtttaagacacttccgtcacatcccaccccatcctccagggctcaacactgtgacatctctattccccaccctccccttcccagggcaataaaatgaccatggagggggcttgcactctcttggctgtcacccgatcgccagcaaaacttagatgtgagaaaaccccttcccattccatggcgaaaacatctccttagaaaagccattaccctcattaggcatggttttgggctcccaaaacacctgacagcccctccctcctctgagaggcggagagtgctgactgtagtgaccattgcatgccgggtgcagcatctggaagagctaggcagggtgtctgccccctcctgagttgaagtcatgctcccctgtgccagcccagaggccgagagctatggacagcattgccagtaacacaggccaccctgtgcagaagggagctggctccagcctggaaacctgtctgaggttgggagaggtgcacttggggcacagggagaggccgggacacacttagctggagatgtctctaaaagccctgtatcgtattcaccttcagtttttgtgttttgggacaattactttagaaaataagtaggtcgttttaaaaacaaaaattattgattgcttttttgtagtgttcagaaaaaaggttctttgtgtatagccaaatgactgaaagcactgatatatttaaaaacaaaaggcaatttattaaggaaatttgtaccatttcagtaaacctgtctgaatgtacctgtatacgtttcaaaaacaccccccccccactgaatccctgtaacctatttattatataaagagtttgccttataaatttacataaaaatgtccgtttgtgtcttttgttgtaaaaatcaagtgattttttcataaggttcttttactattggaaaagatgggcagcacgcagttttattttatttttgtaagttttttaatacatgtgaaagcaaagaatactcagcatgcctttctaagtgacgcgtttgcaccttttgttgggaagtactgtatcctgtgctgttagcattctcgataaatctctctgtgaaagtga

SEQ ID NO: 1067 - DNA, 10358 bp, Homo sapiens
  source 1..10358: mol_type = genomic DNA
gcgcgcgctccctcctctcggagagagggctgtggtaaaagccgtccggaaaatggccgccgccgccgccgccgcgccgagcggaggaggaggaggaggcgaggaggagagactgctccataaaaatacagactcaccagttcctgctttgatgtgacatgtgactccccagaatacaccttgcttctgtagaccagctccaacaggattccatggtagctgggatgttagggctcagggaagaaaagtcagaagaccaggacctccagggcctcaaggacaaacccctcaagtttaaaaaggtgaagaaagataagaaagaagagaaagagggcaagcatgagcccgtgcagccatcagcccaccactctgctgagcccgcagaggcaggcaaagcagagacatcagaagggtcaggctccgccccggctgtgccggaagcttctgcctcccccaaacagcggcgctccatcatccgtgaccggggacccatgtatgatgaccccaccctgcctgaaggctggacacggaagcttaagcaaaggaaatctggccgctctgctgggaagtatgatgtgtatttgatcaatccccagggaaaagcctttcgctctaaagtggagttgattgcgtacttcgaaaagctccaggaactggcagaggccggggacgccccaaagggagcggcaccacgagacccaaggcggccacgtcagagggtgtgcaggtgaaaagggtcctggagaaaagtcctgggaagctccttgtcaagatgccttttcaaacttcgccagggggcaaggctgaggggggtggggccaccacatccacccaggtcatggtgatcaaacgccccggcaggaagcgaaaagctgaggccgaccctcaggccattcccaagaaacggggccgaaagccggggagtgtggtggcagccgctgccgccgaggccaaaaagaaagccgtgaaggagtcttctatccgatctgtgcaggagaccgtactccccatcaagaagcgcaagacccgggagacggtcagcatcgaggtcaaggaagtggtgaagcccctgctggtgtccaccctcggtgagaagagcgggaaaggactgaagacctgtaagagccctgggcggaaaagcaaggagagcagccccaaggggcgcagcagcagcgcctcctcaccccccaagaaggagcaccaccaccatcaccaccactcagagtccccaaaggcccccgtgccactgctcccacccctgcccccacctccacctgagcccgagagctccgaggaccccaccagcccccctgagccccaggacttgagcagcagcgtctgcaaagaggagaagatgcccagaggaggctcactggagagcgacggctgccccaaggagccagctaagactcagcccgcggttgccaccgccgccacggccgcagaaaagtacaaacaccgaggggagggagagcgcaaagacattgtttcatcctccatgccaaggccaaacagagaggagcctgtggacagccggacgcccgtgaccgagagagttagctgactttacacggagcggattgcaaagcaaaccaacaagaataaaggcagctgttgtctcttctccttatgggtagggctctgacaaagcttcccgattaactgaaataaaaaatatttttttttctttcagtaaacttagagtttcgtggcttcagggtgggagtagttggagcattggggatgtttttcttaccgacaagcacagtcaggttgaagacctaaccagggccagaagtagctttgcacttttctaaactaggctccttcaacaaggcttgctgcagatactactgaccagacaagctgttgaccaggcacctcccctcccgcccaaacctttcccccatgtggtcgttagagacagagcgacagagcagttgagaggacactcccgttttcggtgccatcagtgccccgtctacagctcccccagctccccccacctcccccactcccaaccacgttgggacagggaggtgtgaggcaggagagacagttggattctttagagaagatggatatgaccagtggctatggcctgtgcgatcccacccgtggtggctcaagtctggccccacaccagccccaatccaaaactggcaaggacgcttcacaggacaggaaagtggcacctgtctgctccagctctggcatggctaggaggggggagtcccttgaactactgggtgtagactggcctgaaccacaggagaggatggcccagggtgaggtggcatggtccattctcaagggacgtcctccaacgggtggcgctagaggccatggaggcagtaggacaaggtgcaggcaggctggcctggggtcaggccgggcagagcacagcggggtgagagggattcctaatcactcagagcagtctgtgacttagtggacaggggagggggcaaagggggaggagaagaaaatgttcttccagttactttccaattctcctttagggacagcttagaattatttgcactattgagtcttcatgttcccacttcaaaacaaacagatgctctgagagcaaactggcttgaattggtgacatttagtccctcaagccaccagatgtgacagtgttgagaactacctggatttgtatatatacctgcgcttgttttaaagtgggctcagcacatagggttcccacgaagctccgaaactctaagtgtttgctgcaattttataaggacttcctgattggtttctcttctccccttccatttctgccttttgttcatttcatcctttcacttctttcccttcctccatcctcctccttcctagttcatcccttctcttccaggcagccgcggtgcccaaccacacttgtcggctccagtccccagaactctgcctgccctttgtcctcctgctgccagtaccagccccaccctgttttgagccctgaggaggccttgggctctgctgagtccgacctggcctgtctgtgaagagcaagagagcagcaaggtcttgctctcctaggtagccccctcttccctggtaagaaaaagcaaaaggcatttcccaccctgaacaacgagccttttcacccttctactctagagaagtggactggaggagctgggcccgatttggtagttgaggaaagcacagaggcctcctgtggcctgccagtcatcgagtggcccaacaggggctccatgccagccgaccttgacctcactcagaagtccagagtctagcgtagtgcagcagggcagtagcggtaccaatgcagaactcccaagacccgagctgggaccagtacctgggtccccagcccttcctctgctcccccttttccctcggagttcttcttgaatggcaatgttttgcttttgctcgatgcagacagggggccagaacaccacacatttcactgtctgtctggtccatagctgtggtgtaggggcttagaggcatgggcttgctgtgggtttttaattgatcagttttcatgtgggatcccatctttttaacctctgttcaggaagtccttatctagctgcatatcttcatcatattggtatatccttttctgtgtttacagagatgtctcttatatctaaatctgtccaactgagaagtaccttatcaaagtagcaaatgagacagcagtcttatgcttccagaaacacccacaggcatgtcccatgtgagctgctgccatgaactgtcaagtgtgtgttgtcttgtgtatttcagttattgtccctggcttccttactatggtgtaatcatgaaggagtgaaacatcatagaaactgtctagcacttccttgccagtctttagtgatcaggaaccatagttgacagttccaatcagtagcttaagaaaaaaccgtgtttgtctcttctggaatggttagaagtgagggagtttgccccgttctgtttgtagagtctcatagttggactttctagcatatatgtgtccatttccttatgctgtaaaagcaagtcctgcaaccaaactcccatcagcccaatccctgatccctgatcccttccacctgctctgctgatgacccccccagcttcacttctgactcttccccaggaagggaaggggggtcagaagagagggtgagtcctccagaactcttcctccaaggacagaaggctcctgcccccatagtggcctcgaactcctggcactaccaaaggacacttatccacgagagcgcagcatccgaccaggttgtcactgagaagatgtttattttggtcagttgggtttttatgtattatacttagtcaaatgtaatgtggcttctggaatcattgtccagagctgcttccccgtcacctgggcgtcatctggtcctggtaagaggagtgcgtggcccaccaggcccccctgtcacccatgacagttcattcagggccgatggggcagtcgtggttgggaacacagcatttcaagcgtcactttatttcattcgggccccacctgcagctccctcaaagaggcagttgcccagcctctttcccttccagtttattccagagctgccagtggggcctgaggctccttagggttttctctctatttccccctttcttcctcattccctcgtctttcccaaaggcatcacgagtcagtcgcctttcagcaggcagccttggcggtttatcgccctggcaggcaggggccctgcagctctcatgctgcccctgccttggggtcaggttgacaggaggttggagggaaagccttaagctgcaggattctcaccagctgtgtccggcccagttttggggtgtgacctcaatttcaattttgtctgtacttgaacattatgaagatgggggcctctttcagtgaatttgtgaacagcagaattgaccgacagctttccagtacccatggggctaggtcattaaggccacatccacagtctcccccacccttgttccagttgttagttactacctcctctcctgacaatactgtatgtcgtcgagctccccccaggtctacccctcccggccctgcctgctggtgggcttgtcatagccagtgggattgccggtcttgacagctcagtgagctggagatacttggtcacagccaggcgctagcacagctcccttctgttgatgctgtattcccatatcaaaagacacaggggacacccagaaacgccacatcccccaatccatcagtgccaaactagccaacggccccagcttctcagctcgctggatggcggaagctgctactcgtgagcgccagtgcgggtgcagacaatcttctgttgggtggcatcattccaggcccgaagcatgaacagtgcacctgggacagggagcagccccaaattgtcacctgcttctctgcccagcttttcattgctgtgacagtgatggcgaaagagggtaataaccagacacaaactgccaagttgggtggagaaaggagtttctttagctgacagaatctctgaattttaaatcacttagtaagcggctcaagcccaggagggagcagagggatacgagcggagtcccctgcgcgggaccatctggaattggtttagcccaagtggagcctgacagccagaactctgtgtcccccgtctaaccacagctccttttccagagcattccagtcaggctctctgggctgactgggccaggggaggttacaggtaccagttctttaagaagatctttgggcatatacatttttagcctgtgtcattgccccaaatggattcctgtttcaagttcacacctgcagattctaggacctgtgtcctagacttcagggagtcagctgtttctagagttcctaccatggagtgggtctggaggacctgcccggtgggggggcagagccctgctccctccgggtcttcctactcttctctctgctctgacgggatttgttgattctctccattttggtgtctttctcttttagatattgtatcaatctttagaaaaggcatagtctacttgttataaatcgttaggatactgcctcccccagggtctaaaattacatattagaggggaaaagctgaacactgaagtcagttctcaacaatttagaaggaaaacctagaaaacatttggcagaaaattacatttcgatgtttttgaatgaatacgagcaagcttttacaacagtgctgatctaaaaatacttagcacttggcctgagatgcctggtgagcattacaggcaaggggaatctggaggtagccgacctgaggacatggcttctgaacctgtcttttgggagtggtatggaaggtggagcgttcaccagtgacctggaaggcccagcaccaccctccttcccactcttctcatcttgacagagcctgccccagcgctgacgtgtcaggaaaacacccagggaactaggaaggcacttctgcctgaggggcagcctgccttgcccactcctgctctgctcgcctcggatcagctgagccttctgagctggcctctcactgcctccccaaggccccctgcctgccctgtcaggaggcagaaggaagcaggtgtgagggcagtgcaaggagggagcacaacccccagctcccgctccgggctccgacttgtgcacaggcagagcccagaccctggaggaaatcctacctttgaattcaagaacatttggggaatttggaaatctctttgcccccaaacccccattctgtcctacctttaatcaggtcctgctcagcagtgagagcagatgaggtgaaaaggccaagaggtttggctcctgcccactgatagcccctctccccgcagtgtttgtgtgtcaagtggcaaagctgttcttcctggtgaccctgattatatccagtaacacatagactgtgcgcataggcctgctttgtctcctctatcctgggcttttgttttgctttttagttttgcttttagtttttctgtcccttttatttaacgcaccgactagacacacaaagcagttgaatttttatatatatatctgtatattgcacaattataaactcattttgcttgtggctccacacacacaaaaaaagacctgttaaaattatacctgttgcttaattacaatatttctgataaccatagcataggacaagggaaaataaaaaaagaaaaaaaagaaaaaaaaacgacaaatctgtctgctggtcacttcttctgtccaagcagattcgtggtcttttcctcgcttctttcaagggctttcctgtgccaggtgaaggaggctccaggcagcacccaggttttgcactcttgtttctcccgtgcttgtgaaagaggtcccaaggttctgggtgcaggagcgctcccttgacctgctgaagtccggaacgtagtcggcacagcctggtcgccttccacctctgggagctggagtccactggggtggcctgactcccccagtccccttcccgtgacctggtcagggtgagcccatgtggagtcagcctcgcaggcctccctgccagtagggtccgagtgtgtttcatccttcccactctgtcgagcctgggggctggagcggagacgggaggcctggcctgtctcggaacctgtgagctgcaccaggtagaacgccagggaccccagaatcatgtgcgtcagtccaaggggtcccctccaggagtagtgaagactccagaaatgtccctttcttctcccccatcctacgagtaattgcatttgcttttgtaattcttaatgagcaatatctgctagagagtttagctgtaacagttctttttgatcatctttttttaataattagaaacaccaaaaaaatccagaaacttgttcttccaaagcagagagcattataatcaccagggccaaaagcttccctccctgctgtcattgcttcttctgaggcctgaatccaaaagaaaaacagccataggccctttcagtggccgggctacccgtgagcccttcggaggaccagggctggggcagcctctgggcccacatccggggccagctccggcgtgtgttcagtgttagcagtgggtcatgatgctctttcccacccagcctgggataggggcagaggaggcgaggaggccgttgccgctgatgtttggccgtgaacaggtgggtgtctgcgtgcgtccacgtgcgtgttttctgactgacatgaaatcgacgcccgagttagcctcacccggtgacctctagccctgcccggatggagcggggcccacccggttcagtgtttctggggagctggacagtggagtgcaaaaggcttgcagaacttgaagcctgctccttcccttgctaccacggcctcctttccgtttgatttgtcactgcttcaatcaataacagccgctccagagtcagtagtcaatgaatatatgaccaaatatcaccaggactgttactcaatgtgtgccgagcccttgcccatgctgggctcccgtgtatctggacactgtaacgtgtgctgtgtttgctccccttccccttccttctttgccctttacttgtctttctggggtttttctgtttgggtttggtttggtttttatttctccttttgtgttccaaacatgaggttctctctactggtcctcttaactgtggtgttgaggcttatatttgtgtaatttttggtgggtgaaaggaattttgctaagtaaatctcttctgtgtttgaactgaagtctgtattgtaactatgtttaaagtaattgttccagagacaaatatttctagacactttttctttacaaacaaaagcattcggagggagggggatggtgactgagatgagaggggagagctgaacagatgacccctgcccagatcagccagaagccacccaaagcagtggagcccaggagtcccactccaagccagcaagccgaatagctgatgtgttgccactttccaagtcactgcaaaaccaggttttgttccgcccagtggattcttgttttgcttcccctccccccgagattattaccaccatcccgtgcttttaaggaaaggcaagattgatgtttccttgaggggagccaggaggggatgtgtgtgtgcagagctgaagagctggggagaatggggctgggcccacccaagcaggaggctgggacgctctgctgtgggcacaggtcaggctaatgttggcagatgcagctcttcctggacaggccaggtggtgggcattctctctccaaggtgtgccccgtgggcattactgtttaagacacttccgtcacatcccaccccatcctccagggctcaacactgtgacatctctattccccaccctccccttcccagggcaataaaatgaccatggagggggcttgcactctcttggctgtcacccgatcgccagcaaaacttagatgtgagaaaaccccttcccattccatggcgaaaacatctccttagaaaagccattaccctcattaggcatggttttgggctcccaaaacacctgacagcccctccctcctctgagaggcggagagtgctgactgtagtgaccattgcatgccgggtgcagcatctggaagagctaggcagggtgtctgccccctcctgagttgaagtcatgctcccctgtgccagcccagaggccgagagctatggacagcattgccagtaacacaggccaccctgtgcagaagggagctggctccagcctggaaacctgtctgaggttgggagaggtgcacttggggcacagggagaggccgggacacacttagctggagatgtctctaaaagccctgtatcgtattcaccttcagtttttgtgttttgggacaattactttagaaaataagtaggtcgttttaaaaacaaaaattattgattgcttttttgtagtgttcagaaaaaaggttctttgtgtatagccaaatgactgaaagcactgatatatttaaaaacaaaaggcaatttattaaggaaatttgtaccatttcagtaaacctgtctgaatgtacctgtatacgtttcaaaaacaccccccccccactgaatccctgtaacctatttattatataaagagtttgccttataaatttacataaaaatgtccgtttgtgtcttttgttgtaaaaatcaagtgattttttcataaggttcttttactattggaaaagatgggcagcacgcagttttattttatttttgtaagttttttaatacatgtgaaagcaaagaatactcagcatgcctttctaagtgacgcgtttgcaccttttgttgggaagtactgtatcctgtgctgttagcattctcgataaatctctctgtgaaagtga

SEQ ID NO: 1068 - DNA, 10234 bp, Homo sapiens
  source 1..10234: mol_type = genomic DNA
gcgcgcgctccctcctctcggagagagggctgtggtaaaagccgtccggaaaatggccgccgccgccgccgccgcgccgagcggaggaggaggaggaggcgaggaggagagactggaagaaaagtcagaagaccaggacctccagggcctcaaggacaaacccctcaagtttaaaaaggtgaagaaagataagaaagaagagaaagagggcaagcatgagcccgtgcagccatcagcccaccactctgctgagcccgcagaggcaggcaaagcagagacatcagaagggtcaggctccgccccggctgtgccggaagcttctgcctcccccaaacagcggcgctccatcatccgtgaccggggacccatgtatgatgaccccaccctgcctgaaggctggacacggaagcttaagcaaaggaaatctggccgctctgctgggaagtatgatgtgtatttgatcaatccccagggaaaagcctttcgctctaaagtggagttgattgcgtacttcgaaaagctccaggaactggcagaggccggggacgccccaaagggagcggcaccacgagacccaaggcggccacgtcagagggtgtgcaggtgaaaagggtcctggagaaaagtcctgggaagctccttgtcaagatgccttttcaaacttcgccagggggcaaggctgaggggggtggggccaccacatccacccaggtcatggtgatcaaacgccccggcaggaagcgaaaagctgaggccgaccctcaggccattcccaagaaacggggccgaaagccggggagtgtggtggcagccgctgccgccgaggccaaaaagaaagccgtgaaggagtcttctatccgatctgtgcaggagaccgtactccccatcaagaagcgcaagacccgggagacggtcagcatcgaggtcaaggaagtggtgaagcccctgctggtgtccaccctcggtgagaagagcgggaaaggactgaagacctgtaagagccctgggcggaaaagcaaggagagcagccccaaggggcgcagcagcagcgcctcctcaccccccaagaaggagcaccaccaccatcaccaccactcagagtccccaaaggcccccgtgccactgctcccacccctgcccccacctccacctgagcccgagagctccgaggaccccaccagcccccctgagccccaggacttgagcagcagcgtctgcaaagaggagaagatgcccagaggaggctcactggagagcgacggctgccccaaggagccagctaagactcagcccgcggttgccaccgccgccacggccgcagaaaagtacaaacaccgaggggagggagagcgcaaagacattgtttcatcctccatgccaaggccaaacagagaggagcctgtggacagccggacgcccgtgaccgagagagttagctgactttacacggagcggattgcaaagcaaaccaacaagaataaaggcagctgttgtctcttctccttatgggtagggctctgacaaagcttcccgattaactgaaataaaaaatatttttttttctttcagtaaacttagagtttcgtggcttcagggtgggagtagttggagcattggggatgtttttcttaccgacaagcacagtcaggttgaagacctaaccagggccagaagtagctttgcacttttctaaactaggctccttcaacaaggcttgctgcagatactactgaccagacaagctgttgaccaggcacctcccctcccgcccaaacctttcccccatgtggtcgttagagacagagcgacagagcagttgagaggacactcccgttttcggtgccatcagtgccccgtctacagctcccccagctccccccacctcccccactcccaaccacgttgggacagggaggtgtgaggcaggagagacagttggattctttagagaagatggatatgaccagtggctatggcctgtgcgatcccacccgtggtggctcaagtctggccccacaccagccccaatccaaaactggcaaggacgcttcacaggacaggaaagtggcacctgtctgctccagctctggcatggctaggaggggggagtcccttgaactactgggtgtagactggcctgaaccacaggagaggatggcccagggtgaggtggcatggtccattctcaagggacgtcctccaacgggtggcgctagaggccatggaggcagtaggacaaggtgcaggcaggctggcctggggtcaggccgggcagagcacagcggggtgagagggattcctaatcactcagagcagtctgtgacttagtggacaggggagggggcaaagggggaggagaagaaaatgttcttccagttactttccaattctcctttagggacagcttagaattatttgcactattgagtcttcatgttcccacttcaaaacaaacagatgctctgagagcaaactggcttgaattggtgacatttagtccctcaagccaccagatgtgacagtgttgagaactacctggatttgtatatatacctgcgcttgttttaaagtgggctcagcacatagggttcccacgaagctccgaaactctaagtgtttgctgcaattttataaggacttcctgattggtttctcttctccccttccatttctgccttttgttcatttcatcctttcacttctttcccttcctccatcctcctccttcctagttcatcccttctcttccaggcagccgcggtgcccaaccacacttgtcggctccagtccccagaactctgcctgccctttgtcctcctgctgccagtaccagccccaccctgttttgagccctgaggaggccttgggctctgctgagtccgacctggcctgtctgtgaagagcaagagagcagcaaggtcttgctctcctaggtagccccctcttccctggtaagaaaaagcaaaaggcatttcccaccctgaacaacgagccttttcacccttctactctagagaagtggactggaggagctgggcccgatttggtagttgaggaaagcacagaggcctcctgtggcctgccagtcatcgagtggcccaacaggggctccatgccagccgaccttgacctcactcagaagtccagagtctagcgtagtgcagcagggcagtagcggtaccaatgcagaactcccaagacccgagctgggaccagtacctgggtccccagcccttcctctgctcccccttttccctcggagttcttcttgaatggcaatgttttgcttttgctcgatgcagacagggggccagaacaccacacatttcactgtctgtctggtccatagctgtggtgtaggggcttagaggcatgggcttgctgtgggtttttaattgatcagttttcatgtgggatcccatctttttaacctctgttcaggaagtccttatctagctgcatatcttcatcatattggtatatccttttctgtgtttacagagatgtctcttatatctaaatctgtccaactgagaagtaccttatcaaagtagcaaatgagacagcagtcttatgcttccagaaacacccacaggcatgtcccatgtgagctgctgccatgaactgtcaagtgtgtgttgtcttgtgtatttcagttattgtccctggcttccttactatggtgtaatcatgaaggagtgaaacatcatagaaactgtctagcacttccttgccagtctttagtgatcaggaaccatagttgacagttccaatcagtagcttaagaaaaaaccgtgtttgtctcttctggaatggttagaagtgagggagtttgccccgttctgtttgtagagtctcatagttggactttctagcatatatgtgtccatttccttatgctgtaaaagcaagtcctgcaaccaaactcccatcagcccaatccctgatccctgatcccttccacctgctctgctgatgacccccccagcttcacttctgactcttccccaggaagggaaggggggtcagaagagagggtgagtcctccagaactcttcctccaaggacagaaggctcctgcccccatagtggcctcgaactcctggcactaccaaaggacacttatccacgagagcgcagcatccgaccaggttgtcactgagaagatgtttattttggtcagttgggtttttatgtattatacttagtcaaatgtaatgtggcttctggaatcattgtccagagctgcttccccgtcacctgggcgtcatctggtcctggtaagaggagtgcgtggcccaccaggcccccctgtcacccatgacagttcattcagggccgatggggcagtcgtggttgggaacacagcatttcaagcgtcactttatttcattcgggccccacctgcagctccctcaaagaggcagttgcccagcctctttcccttccagtttattccagagctgccagtggggcctgaggctccttagggttttctctctatttccccctttcttcctcattccctcgtctttcccaaaggcatcacgagtcagtcgcctttcagcaggcagccttggcggtttatcgccctggcaggcaggggccctgcagctctcatgctgcccctgccttggggtcaggttgacaggaggttggagggaaagccttaagctgcaggattctcaccagctgtgtccggcccagttttggggtgtgacctcaatttcaattttgtctgtacttgaacattatgaagatgggggcctctttcagtgaatttgtgaacagcagaattgaccgacagctttccagtacccatggggctaggtcattaaggccacatccacagtctcccccacccttgttccagttgttagttactacctcctctcctgacaatactgtatgtcgtcgagctccccccaggtctacccctcccggccctgcctgctggtgggcttgtcatagccagtgggattgccggtcttgacagctcagtgagctggagatacttggtcacagccaggcgctagcacagctcccttctgttgatgctgtattcccatatcaaaagacacaggggacacccagaaacgccacatcccccaatccatcagtgccaaactagccaacggccccagcttctcagctcgctggatggcggaagctgctactcgtgagcgccagtgcgggtgcagacaatcttctgttgggtggcatcattccaggcccgaagcatgaacagtgcacctgggacagggagcagccccaaattgtcacctgcttctctgcccagcttttcattgctgtgacagtgatggcgaaagagggtaataaccagacacaaactgccaagttgggtggagaaaggagtttctttagctgacagaatctctgaattttaaatcacttagtaagcggctcaagcccaggagggagcagagggatacgagcggagtcccctgcgcgggaccatctggaattggtttagcccaagtggagcctgacagccagaactctgtgtcccccgtctaaccacagctccttttccagagcattccagtcaggctctctgggctgactgggccaggggaggttacaggtaccagttctttaagaagatctttgggcatatacatttttagcctgtgtcattgccccaaatggattcctgtttcaagttcacacctgcagattctaggacctgtgtcctagacttcagggagtcagctgtttctagagttcctaccatggagtgggtctggaggacctgcccggtgggggggcagagccctgctccctccgggtcttcctactcttctctctgctctgacgggatttgttgattctctccattttggtgtctttctcttttagatattgtatcaatctttagaaaaggcatagtctacttgttataaatcgttaggatactgcctcccccagggtctaaaattacatattagaggggaaaagctgaacactgaagtcagttctcaacaatttagaaggaaaacctagaaaacatttggcagaaaattacatttcgatgtttttgaatgaatacgagcaagcttttacaacagtgctgatctaaaaatacttagcacttggcctgagatgcctggtgagcattacaggcaaggggaatctggaggtagccgacctgaggacatggcttctgaacctgtcttttgggagtggtatggaaggtggagcgttcaccagtgacctggaaggcccagcaccaccctccttcccactcttctcatcttgacagagcctgccccagcgctgacgtgtcaggaaaacacccagggaactaggaaggcacttctgcctgaggggcagcctgccttgcccactcctgctctgctcgcctcggatcagctgagccttctgagctggcctctcactgcctccccaaggccccctgcctgccctgtcaggaggcagaaggaagcaggtgtgagggcagtgcaaggagggagcacaacccccagctcccgctccgggctccgacttgtgcacaggcagagcccagaccctggaggaaatcctacctttgaattcaagaacatttggggaatttggaaatctctttgcccccaaacccccattctgtcctacctttaatcaggtcctgctcagcagtgagagcagatgaggtgaaaaggccaagaggtttggctcctgcccactgatagcccctctccccgcagtgtttgtgtgtcaagtggcaaagctgttcttcctggtgaccctgattatatccagtaacacatagactgtgcgcataggcctgctttgtctcctctatcctgggcttttgttttgctttttagttttgcttttagtttttctgtcccttttatttaacgcaccgactagacacacaaagcagttgaatttttatatatatatctgtatattgcacaattataaactcattttgcttgtggctccacacacacaaaaaaagacctgttaaaattatacctgttgcttaattacaatatttctgataaccatagcataggacaagggaaaataaaaaaagaaaaaaaagaaaaaaaaacgacaaatctgtctgctggtcacttcttctgtccaagcagattcgtggtcttttcctcgcttctttcaagggctttcctgtgccaggtgaaggaggctccaggcagcacccaggttttgcactcttgtttctcccgtgcttgtgaaagaggtcccaaggttctgggtgcaggagcgctcccttgacctgctgaagtccggaacgtagtcggcacagcctggtcgccttccacctctgggagctggagtccactggggtggcctgactcccccagtccccttcccgtgacctggtcagggtgagcccatgtggagtcagcctcgcaggcctccctgccagtagggtccgagtgtgtttcatccttcccactctgtcgagcctgggggctggagcggagacgggaggcctggcctgtctcggaacctgtgagctgcaccaggtagaacgccagggaccccagaatcatgtgcgtcagtccaaggggtcccctccaggagtagtgaagactccagaaatgtccctttcttctcccccatcctacgagtaattgcatttgcttttgtaattcttaatgagcaatatctgctagagagtttagctgtaacagttctttttgatcatctttttttaataattagaaacaccaaaaaaatccagaaacttgttcttccaaagcagagagcattataatcaccagggccaaaagcttccctccctgctgtcattgcttcttctgaggcctgaatccaaaagaaaaacagccataggccctttcagtggccgggctacccgtgagcccttcggaggaccagggctggggcagcctctgggcccacatccggggccagctccggcgtgtgttcagtgttagcagtgggtcatgatgctctttcccacccagcctgggataggggcagaggaggcgaggaggccgttgccgctgatgtttggccgtgaacaggtgggtgtctgcgtgcgtccacgtgcgtgttttctgactgacatgaaatcgacgcccgagttagcctcacccggtgacctctagccctgcccggatggagcggggcccacccggttcagtgtttctggggagctggacagtggagtgcaaaaggcttgcagaacttgaagcctgctccttcccttgctaccacggcctcctttccgtttgatttgtcactgcttcaatcaataacagccgctccagagtcagtagtcaatgaatatatgaccaaatatcaccaggactgttactcaatgtgtgccgagcccttgcccatgctgggctcccgtgtatctggacactgtaacgtgtgctgtgtttgctccccttccccttccttctttgccctttacttgtctttctggggtttttctgtttgggtttggtttggtttttatttctccttttgtgttccaaacatgaggttctctctactggtcctcttaactgtggtgttgaggcttatatttgtgtaatttttggtgggtgaaaggaattttgctaagtaaatctcttctgtgtttgaactgaagtctgtattgtaactatgtttaaagtaattgttccagagacaaatatttctagacactttttctttacaaacaaaagcattcggagggagggggatggtgactgagatgagaggggagagctgaacagatgacccctgcccagatcagccagaagccacccaaagcagtggagcccaggagtcccactccaagccagcaagccgaatagctgatgtgttgccactttccaagtcactgcaaaaccaggttttgttccgcccagtggattcttgttttgcttcccctccccccgagattattaccaccatcccgtgcttttaaggaaaggcaagattgatgtttccttgaggggagccaggaggggatgtgtgtgtgcagagctgaagagctggggagaatggggctgggcccacccaagcaggaggctgggacgctctgctgtgggcacaggtcaggctaatgttggcagatgcagctcttcctggacaggccaggtggtgggcattctctctccaaggtgtgccccgtgggcattactgtttaagacacttccgtcacatcccaccccatcctccagggctcaacactgtgacatctctattccccaccctccccttcccagggcaataaaatgaccatggagggggcttgcactctcttggctgtcacccgatcgccagcaaaacttagatgtgagaaaaccccttcccattccatggcgaaaacatctccttagaaaagccattaccctcattaggcatggttttgggctcccaaaacacctgacagcccctccctcctctgagaggcggagagtgctgactgtagtgaccattgcatgccgggtgcagcatctggaagagctaggcagggtgtctgccccctcctgagttgaagtcatgctcccctgtgccagcccagaggccgagagctatggacagcattgccagtaacacaggccaccctgtgcagaagggagctggctccagcctggaaacctgtctgaggttgggagaggtgcacttggggcacagggagaggccgggacacacttagctggagatgtctctaaaagccctgtatcgtattcaccttcagtttttgtgttttgggacaattactttagaaaataagtaggtcgttttaaaaacaaaaattattgattgcttttttgtagtgttcagaaaaaaggttctttgtgtatagccaaatgactgaaagcactgatatatttaaaaacaaaaggcaatttattaaggaaatttgtaccatttcagtaaacctgtctgaatgtacctgtatacgtttcaaaaacaccccccccccactgaatccctgtaacctatttattatataaagagtttgccttataaatttacataaaaatgtccgtttgtgtcttttgttgtaaaaatcaagtgattttttcataaggttcttttactattggaaaagatgggcagcacgcagttttattttatttttgtaagttttttaatacatgtgaaagcaaagaatactcagcatgcctttctaagtgacgcgtttgcaccttttgttgggaagtactgtatcctgtgctgttagcattctcgataaatctctctgtgaaagtga

SEQ ID NO: 1069 - RNA, 18 nt, synthetic construct
  source 1..18: mol_type = other RNA
tcactttcataatgctgg

SEQ ID NO: 1070 - DNA, 20 bp, synthetic construct
  source 1..20: mol_type = other DNA
aactctctcggtcacgggcg

SEQ ID NO: 1071 - DNA, 20 bp, synthetic construct
  source 1..20: mol_type = other DNA
cacactgacctttcagggct

SEQ ID NO: 1072 - DNA, 20 bp, synthetic construct
  source 1..20: mol_type = other DNA
gatcactggaacacaatggt

SEQ ID NO: 1073 - DNA, 20 bp, synthetic construct
  source 1..20: mol_type = other DNA
cgtgccatggaagtccttcc

SEQ ID NO: 1074 - DNA, 20 bp, synthetic construct
  source 1..20: mol_type = other DNA
ggtttttctcctttattatc